(19) United States
(12) Patent Application Publication
(10) Pub. No.: US 2010/0223687 A1
(43) Pub. Date: Sep. 2, 2010

(54) COMPOSITIONS AND METHODS FOR DIAGNOSIS OF GENETIC SUSCEPTIBILITY, RESISTANCE, OR TOLERANCE TO INFECTION BY MYCOBACTERIA AND BOVINE PARATUBERCULOSIS

(75) Inventors: Holly L. Neibergs, Palouse, WA (US); Ricardo Zanella, Paim Filho (BR); Matthew Settles, Pullman, WA (US); Robert H. Whitlock, Kennett Square, PA (US); Jeremy F. Taylor, Columbia, MO (US)

Correspondence Address: DAVIS WRIGHT TREMAINE, LLP/Seattle, 1201 Third Avenue, Suite 2200, SEATTLE, WA, 98101-3045, US

(73) Assignee: Washington State University, Pullman, WA (US)

(21) Appl. No.: 12/620,524

(22) Filed: Nov. 17, 2009

Related U.S. Application Data
(60) Provisional application No. 61/199,550, filed on Nov. 17, 2008.

(51) Int. Cl. A01K 67/02; C12Q 1/68

(52) U.S. Cl. 800/22; 435/6

(57) ABSTRACT

Provided are methods for determining resistance or tolerance of a subject to Mycobacterium avium subspecies paratuberculosis (Map) infection, comprising determining, a presence or absence of a mutation, or the genotype of a single nucleotide polymorphism (SNP) within Map infection linkage disequilibrium region SEQ ID NO:46 that segregates with resistance or tolerance to Map infection, or determining a presence or absence of a mutation or a genotype of a SNP within a Map infection linkage disequilibrium region (SEQ ID NO:1) that is in linkage disequilibrium therewith, and determining, based thereon, susceptibility, resistance or tolerance of the subject to Map infection. In particular aspects, a presence or absence of a mutation, or the genotype of a single nucleotide polymorphism (SNP) within at least one gene selected from the group consisting of HIVEP3; EDN2; and LOC521287 that segregates with resistance or tolerance to Map tissue infection is determined.

### CROSS-REFERENCE TO RELATED APPLICATIONS

[0001] This application claims the benefit of priority to U.S. Provisional Patent Application Ser. No. 61/199,550, filed Nov. 17, 2008 and entitled GENETIC LOCI ASSOCIATED WITH JOHNE′S DISEASE, incorporated herein by reference in its entirety.

### STATEMENT REGARDING FEDERALLY-SPONSORED RESEARCH

[0002] This invention was made with government support under National Research Initiative grants 2005-35205-15448, 2005-35604-15615, 2006-35205-16701, and 2006-35616-16697 from the USDA Cooperative State Research, Education, and Extension Service. The Government has certain rights in the invention.

### TECHNICAL FIELD

[0003] The invention relates generally to genome-wide association studies to identify genetic loci associated with susceptibility, resistance or tolerance to disease, and in more particular aspects to identifying bovine genetic loci associated with susceptibility, resistance or tolerance to infection by Mycobacteria and Paratuberculosis, and to compositions and methods for diagnosis thereof. Certain aspects relate to methods comprising determination of a presence or absence of a mutation, or the genotype of a single nucleotide polymorphism (SNP) within at least one gene selected from the group consisting of HIVEP3; EDN2; and LOC521287 that segregates with resistance or tolerance to Map tissue infection.

### BACKGROUND

[0004] Bovine Paratuberculosis, commonly referred to as Johne's disease, is a contagious bacterial disease estimated to be present in 68.1% of U.S. dairy herds (APHIS 2008) and results in annual losses exceeding U.S. $200 million (Ott et al. 1999). The bacterium Mycobacterium avium subspecies paratuberculosis (Map) is responsible for Johne's disease and causes reduced milk production, reproductive failure, weight loss, and eventual death. Johne's disease is not treatable, and vaccination against Map has been largely unsuccessful.

[0005] The identification of animals with genetic susceptibility, resistance, or tolerance to infection by Map would provide mechanisms to reduce the incidence of Johne's disease. Further, a reduction of Map in the environment may also be beneficial to humans, as the presence of Map has also been implicated in the etiology of Crohn's disease (Bentley et al. 2008). It has been demonstrated that the genetic background of an animal plays a role in its resistance to Johne's disease (Settles et al, 2009). Cattle that are exposed to Mycobacterium avium subspecies paratuberculosis (Map) respond by either resisting or clearing the infection or becoming chronically infected with varying levels of disease severity.

[0006] Resistance or susceptibility to Map infection has been shown to have a hereditary component in cattle and mice (Koets et al. 2000; Mortensen et al. 2004; Gonda et al. 2006; Hinger et al. 2008), with estimates ranging from 0.06 to 0.102. However, attempts to locate genetic loci associated with resistance to paratuberculosis have had limited success. Gonda et al. (2007) found evidence for a quantitative trait locus (QTL) on Bos taurus chromosome 20 (BTA20) associated with paratuberculosis susceptibility. Hinger et al. (2007) investigated the association with paratuberculosis of 8 microsatellites located in or near Map susceptibility candidate genes in 1,179 (594 positive) German Holstein cows. However, none showed any significant associations. While Map susceptibility genes have yet to be identified in the bovine, Reddacliff et al. (2005) found an association of one microsatellite allele in SLC11A1 (formerly NRAMP1) with Map resistance in sheep.

[0007] Resistance to Map has been shown in mice to be associated with the Bcg gene or nramp1 which encodes the natural resistance-associated macrophage protein (Frelier et al. 1990; Skamene, 1989; Skamene et al. 1982). C57/B6 and BALB/c mice have the susceptible allele of Bcg and are susceptible to Map infections, while the C3H/HeJ strain is resistant to Map (Veazey et al. 1995a; Veazey et al. 1995b; Tanaka et al. 1994; Chiodini et al. 1993; Chandler 1962; Tanaka et al. 1994). In cattle, Map-susceptible Holstein sire lines have been found to be infected twice as often as resistant lines (Gonda et al. 2006). Heritability studies have been conducted on the presence or absence of disease based on postmortem tissue, ELISA and combined ELISA-fecal culture tests. In a Dutch study, the heritability of paratuberculosis infection was evaluated among vaccinated and unvaccinated animals based on findings from postmortem examinations (Koets et al. 2000). A heritability of 0.09, 0.01 and 0.06 was found for vaccinated, unvaccinated and all cows, respectively. A second study estimated the heritability of antibody response using a bivariate model with daily milk yield and optical density values from milk ELISAs (Mortensen et al. 2004). Mortensen and coworkers (2004) estimated the heritability to be 0.102 with the bivariate model and 0.091 when a sire model was used. Gonda and colleagues (2006) estimated the heritability of Johne's disease to be 0.153 based on fecal culture diagnostic testing, 0.159 based on ELISA and 0.102 from the combined antibody and fecal culture tests. We (Zanella et al. 2008) estimated the heritability of tolerance to Johne's disease to be 0.09.

[0008] Limited investigations have been conducted to identify loci associated with Johne's disease. Using a candidate gene approach, Taylor and colleagues (2006) evaluated the allele frequencies of a functional candidate gene, CARD15, in 30 unrelated unaffected animals and 11 affected animals without finding evidence for an association. Hinger et al. (2007) also investigated the association with Johne's disease utilizing 8 microsatellite genetic markers located in or near Map susceptibility candidate genes in 1,179 (594 positive) German Holstein cows, but none of the microsatellites revealed any associations. Reddacliff et al. (2005) found an association of one microsatellite allele in SLC11A1 (formerly NRAMP1) with Map resistance in sheep.

[0009] Gonda and coworkers (2006) undertook a genome-wide linkage study using ELISA, fecal culture or both to diagnose infected animals. In this study, microsatellites were used to genotype three half-sib families. The number of informative (useful) markers ranged from 151-176 within the three families. Genotypes of “positive” and “negative” animals were pooled and allele frequencies were estimated. Eight chromosomal regions were associated with the pooled samples (bovine chromosomes 7, 10, 12, 14, 15, 18, 20 and 25). The eight chromosomal regions associated with Map infection in pooled genotypes were further tested. Individual genotypes of the daughters were determined for 3-5 microsatellites within 15 cM (an estimated 15 million base pairs) of the markers identified in the pooled samples. Subsequently, only chromosome 20 was found to be linked (P=0.0319) in a chromosome-wide analysis in one of the sire families.

[0010] Current management practices are to cull cows after either testing positive for Map or exhibiting clinical signs of the disease. However, clinical signs of Map infection may be delayed as long as four to five years after the initial exposure. Current diagnostic testing has a limited sensitivity for detecting the presence of Map in pre-clinical animals, at which time they are likely to be spreading Map to other animals in the herd through fecal contamination of the environment, food, and water. The low overall sensitivity of ELISA (7-35%) and fecal (38-65%) diagnostic tests and the long incubation period of the disease present major roadblocks to the control of Johne's disease (Whitlock et al. 2000; McKenna et al. 2005; Collins et al. 2006).

[0011] Identifying the mutations associated with Map tissue infection will not only provide the opportunity to better understand the genes and gene regulatory elements that are associated with the first event in the pathogenic process that culminates in Johne's disease, but will provide compositions and methods for diagnosis of susceptibility, resistance and/or tolerance to infection by Mycobacterium avium subspecies paratuberculosis (Map).

### SUMMARY OF EXEMPLARY EMBODIMENTS

[0012] Applicants herein identify and disclose mutations and genes associated with Map tissue infection, the first event in the pathogenic process that culminates in Johne's disease. Provided are compositions and methods for diagnosis of susceptibility, resistance and/or tolerance to infection by Mycobacterium avium subspecies paratuberculosis (Map).

[0013] Loci associated with Mycobacterium avium subspecies paratuberculosis (Map) infection status in US Holsteins were identified using a whole genome SNP (single nucleotide polymorphism) assay (Illumina BovineSNP50 BeadChip™). Two hundred forty-five cows from dairies in New York, Pennsylvania, and Vermont were followed to culling between January 1999 and November 2007 and subsequently were assessed for the presence of Map in both fecal samples and necropsy tissue. An animal was considered tissue-infected if any sample contained at least one colony-forming unit per gram of tissue (cfu/g) and the same definition was employed for fecal samples ach animal was genotyped with the Illumina BovineSNP50 BeadChip. After quality assurance filtering, 218 animals and 45,683 SNPs remained. Genetic loci associated with the following four different case/control classifications were identified: presence of Map in the tissue; presence of Map in feces; presence of Map in both tissue and feces; and presence of Map in tissue but not feces. A case-control genome wide association study (GWA) was conducted to test the four different classifications of Map infection status (Cases) when compared to a Map negative control group (Control). Regions on chromosomes 1, 5, 7, 8, 16, 21, and 23 were identified that showed a moderate significance (P<5×10⁻⁵). Regions on chromosomes 3 and 9 were identified with a high level of association to the presence of Map in tissue and both tissue and feces, respectively (P<5×10⁻⁷, genome-wide Bonferonni P<0.05).

[0014] In particular preferred aspects, a 255,586 by region (SEQ ID NO:1) of bovine chromosome 3, referred to herein at the inventive “Map infection linkage disequilibrium region” is disclosed to be associated with Map tissue infection (P=7×10⁻⁸), and is further characterized as including three functionally relevant genes: HIVEP3 (Human immunodeficiency virus type I enhancer-binding protein 3) (SEQ ID NO:2); EDN2 (Endothelin 2) (SEQ ID NO:3); and LOC521287 (Bos taurus similar to forkhead box O6) (SEQ ID NO:4), and the respective coding transcripts (SEQ ID NOS:5, 6 and 7, respectively), and polypeptides (SEQ ID NOS:8, 9 and 10, respectively).

[0015] Particular aspects provide genetic markers (single nucleotide polymorphisms or SNPs) identified within a 76 kb region (SEQ ID NO:46) on chromosome 3 that can be used to predict resistance to Map tissue infection in Holstein cows (P=7×10⁻⁸, P=9×10⁻⁷, P=1.2×10⁻⁵, P=0.0006), and thus resistance of animals to Johne's disease.

[0016] Certain aspects provide a method for determining at least one of susceptibility, resistance or tolerance to Mycobacterium avium subspecies paratuberculosis (Map) infection of a subject, comprising: obtaining a biological sample from a mammalian subject; determining, using the biological sample, a presence or absence of at least one mutation, or the genotype of at least one single nucleotide polymorphism (SNP) within Map infection linkage disequilibrium region SEQ ID NO:46 that segregates with resistance and/or tolerance to Map tissue infection, or determining a presence or absence of at least one mutation or a genotype of at least one SNP within a Map infection linkage disequilibrium region (SEQ ID NO:1) that is in linkage disequilibrium with the presence or absence of the at least one mutation or with the genotype of the at least one SNP within SEQ ID NO:46; and determining, based thereon, at least one of susceptibility, resistance or tolerance of the mammalian subject to Mycobacterium avium subspecies paratuberculosis (Map) infection.

[0017] Additional aspects provide a method for determining at least one of susceptibility, resistance or tolerance to Mycobacterium avium subspecies paratuberculosis (Map) infection of a subject, comprising: obtaining a biological sample from a mammalian subject; analyzing, using the biological sample, a mammalian genotype to determine if the genotype comprises at least one single nucleotide polymorphism (SNP) associated with at least one of susceptibility, resistance or tolerance to Mycobacterium avium subspecies paratuberculosis (Map), wherein the SNP is at least one selected from the SNP group consisting of, relative to the sequence of accession no. NC_{—}007301.3, SNPs at positions 111,606,781, 111,610,137, 111,611,773, 111, 623,092 and 111,682,511 (ARS-BFGL-NGS-113303); and determining, based thereon, at least one of susceptibility, resistance or tolerance of the mammalian subject to Mycobacterium avium subspecies paratuberculosis (Map) infection.

[0018] Further aspects provide a method for determining at least one of susceptibility, resistance or tolerance to Mycobacterium avium subspecies paratuberculosis (Map) infection of a subject, comprising: obtaining a biological sample from a mammalian subject; determining, using the biological sample, a presence or absence of at least one mutation, or the genotype of at least one single nucleotide polymorphism (SNP) within at least one gene selected from the group consisting of HIVEP3 (Human immunodeficiency virus type I enhancer-binding protein 3) (SEQ ID NO:2); EDN2 (Endothelin 2) (SEQ ID NO:3); and LOC521287 (Bos taurus similar to forkhead box O6) (SEQ ID NO:4) that segregates with resistance and/or tolerance to Map tissue infection, or determining a presence or absence of at least one mutation or a genotype of at least one SNP within a Map infection linkage disequilibrium region (SEQ ID NO:1) that is in linkage disequilibrium with the presence or absence of the at least one mutation or with the genotype of the at least one SNP within within at least one gene selected from the group consisting of HIVEP3 (Human immunodeficiency virus type I enhancer-binding protein 3) (SEQ ID NO:2); EDN2 (Endothelin 2) (SEQ ID NO:3); and LOC521287 (Bos taurus similar to forkhead box O6) (SEQ ID NO:4); and determining, based thereon, at least one of susceptibility, resistance or tolerance of the mammalian subject to Mycobacterium avium subspecies paratuberculosis (Map) infection.

[0019] In particular embodiments of the above methods, the at least one single nucleotide polymorphism (SNP) within Map infection linkage disequilibrium region SEQ ID NO:46, is at least one selected from the SNP group consisting of, relative to the sequence of accession no. NC_{—}007301.3, SNPs at positions 111,606,781, 111,610,137, 111,611,773, 111, 623,092 and 111,682,511 (ARS-BFGL-NGS-113303) as defined herein. In certain aspects, the genotypes of at least two single nucleotide polymorphisms (SNPs) within Map infection linkage disequilibrium region SEQ ID NO:46, are determined. In particular embodiments, at least one of resistance or tolerance of the mammalian subject to Mycobacterium avium subspecies paratuberculosis (Map) infection is determined.

[0020] In certain aspects of the above methods, the mammalian subject is bovine.

[0021] Particular aspects of the above methods further comprise at least one of culling, selecting, or breeding, based on the determining of at least one of susceptibility, resistance or tolerance of the mammalian subject to Mycobacterium avium subspecies paratuberculosis (Map) infection.

[0022] Particular aspects of the above methods further comprise selective breeding to produce offspring having at least one of susceptibility, resistance or tolerance to Mycobacterium avium subspecies paratuberculosis (Map) infection.

### BRIEF SUMMARY OF THE DRAWINGS

[0023] FIG. 1 shows a Q-Q plot for p-values from a 1-df test for association (allelic) versus expected for an association of loci with Map infected tissue (tissue positive versus tissue negative). The Q-Q plot shows little to no evidence of a deviation from the expected null distribution of p-values and therefore no evidence of population substructure.

[0024] FIG. 2 shows a Q-Q plot for p-values from a 1-df test for association (allelic) versus expected for an association of loci with Map fecal positive (fecal positive versus fecal negative). The Q-Q plot shows evidence of a deviation from the expected null distribution of p-values and therefore evidence of population substructure.

[0025] FIG. 3 shows a Q-Q plot for stratified test of association (2×2×4 CMH test) within herd versus expected for an association of loci with Map fecal positive (fecal positive versus fecal negative). The Q-Q plot shows little to no evidence of a deviation from the expected null distribution of p-values and therefore no evidence of population substructure.

[0026] FIG. 4 shows a Q-Q plot for 1-df test for association (allelic) versus expected for an association of loci with Map tissue infected, fecal negative (infected) cases versus controls. The Q-Q plot shows little to no evidence of a deviation from the expected null distribution of p-values and therefore no evidence of population substructure.

[0027] FIG. 5 shows a Q-Q plot for p-values from a 1-df test for association (allelic) versus expected for an association of loci with the Map tissue infected, fecal positive (clinical) cases versus controls. The Q-Q plot shows evidence of a deviation from the expected null distribution of p-values and therefore evidence of population substructure.

[0028] FIG. 6 shows a Q-Q plot for the stratified test of association (2×2×4 CMH test) within herd versus expected for an association of loci with the Map tissue infected, fecal positive (clinical) cases versus controls. The Q-Q plot shows little to no evidence of a deviation from the expected null distribution of p-values and therefore no evidence of population substructure.

[0029] FIG. 7 shows a tolerance distribution using peak (left panel) and average (right panel) fecal CFUs and peak (left panel) and average (right panel) tissue CFUs taken at slaughter. The tolerance index was defined as the fecal CFUs (CFU_{f})+100 divided by the tissue (CFUₜ)+100.

[0030] FIG. 8 shows a multidimensional scaling (MDS). MDS provides a spatial representation of the relationship between animals. MDS plots also are useful for detecting underlying substructure in the data. In this experiment, the MDS plot did not identify a population substructure.

[0031] FIG. 9 shows a genome-wide plot of −log₁₀ (p-values) for an association of loci with tolerance index calculated using the peak fecal divided by peak tissue. Chromosomes 1 through 29 and Chromosome X are shown.

[0032] FIG. 10 shows a genome-wide plot of −log₁₀ (p-values) for an association of loci with tolerance index calculated using the average fecal divided by average tissue. Chromosomes 1 through 29 and Chromosome X are shown.

[0033] FIG. 11 shows a Q-Q plot of an association analysis with tolerance as a quantitative trait. In panel 5a the peak fecal CFUs is divided by the peak tissue CFUs. The results indicate that there was no evidence of population stratification (λ_{GC}=1.03). Panel 5b shows the results of an average fecal CFUs divided by average tissue CFUs showing no evidence of population stratification (λ_{GC}=1.00).

[0034] FIG. 12 shows a genome-wide plot of −Log 10(P-values) for 45,683 SNPs tested for an association with Mycobacterium avium subspecies paratuberculosis (Map) infected tissue (tissue positive compared to tissue negative). Chromosomes 1-29 are shown. The horizontal dark grey line is drawn at −log 10 (5×10⁻⁵) and the horizontal black line is drawn at −log 10 (5×10⁻⁷) to show those significant at the moderate and strong levels of significance, respectively. (Settles et al. 2009)

[0035] FIG. 13 shows the locations of single nucleotide polymorphisms (SNPs) (in base pairs) on bovine chromosome 3. The SNP at 111,682,510 (SS86341066) (in bold) was the most strongly associated with tissue infection (P=3×10⁻⁷).

[0036] FIG. 14 shows an association analysis of an 82 kb region of chromosome 3. Location of SNPs in basepairs are listed on the x axis and the −log 10 (p value) of the association of each SNP with Map tissue infection is listed on the y axis. A −log 10 value of 1.2 represents P=0.05. SNPs with the greatest evidence for association with Map tissue infection include the SNP at 111,623,092 (P=9.4×10⁻⁷), the adjacent 3′ SNP 111,693,185 (P=1.1×10⁻⁵) and the SNP located between HIVEP3 and EDN2 at 111,682,510 by (P=7.5×10⁻⁸). SNPs that are marked with ** indicate SNPs that were first analyzed with the use of the Illumina bovine SNP50 BeadChip and were also included in the fine mapping of additional SNPs in this region.

[0037] FIG. 15 shows a schematic of the location of the genetic markers, and their alleles to form a haplotype over an 86 kb region on bovine chromosome 3. The haplotype shown was only seen in animals with Map tissue infection. Similarly, six haplotypes were only seen in cows without Map tissue infection (23%). Bolded alleles indicate markers found to exclusively segregate with resistance to Map tissue infection.

[0038] FIG. 16 shows a multidimensional scaling (MDS) plot. MDS plots provide spatial representations of data that can facilitate interpretation and reveal structural relationships in the data. This MDS plot identified 15 animals (grey) whose multilocus genotypes differed significantly from the other animals allowing these animals to be removed from further analysis.

[0039] FIG. 17 shows a genome-wide plot of −log₁₀(p-values) for an association of loci with Map infected tissue (tissue positive versus tissue negative). Chromosomes 1 through 30 and Chromosome X are shown separated by grey scale. The horizontal dark grey line is drawn at −log 10 (5×10⁻⁵) and the horizontal black line is drawn at −log 10 (5×10⁻⁷) to show those significant at the moderate and strong levels of significance, respectively.

[0040] FIG. 18 shows genome-wide plot of −log₁₀(p-values) for an association of loci with Map tissue infected and fecal positive phenotype (clinical). Chromosomes 1 through 30 and Chromosome X are shown separated by grey scale. The horizontal dark grey line is drawn at −log 10 (5×10⁻⁵) and the horizontal black line is drawn at −log 10 (5×10⁻⁷) to show those significant at the moderate and strong levels of significance, respectively.

[0041] FIG. 19 shows a schematic of the region from chromosome 3 of Bos taurus from position 11432282-111943455 corresponding to NC 007301.3 (based on Btau_{—}4.0).

### DETAILED DESCRIPTION OF EXEMPLARY EMBODIMENTS

[0042] A whole genome association analysis identified markers and loci associated with Mycobacterium avium subsp. Paratuberculosis infection status in U.S. Holstein cattle.

[0043] As disclosed under working EXAMPLE 1 herein below, a GWA study was conducted to identify loci associated with Map infection status using four different case/control classifications of the samples: presence of Map in tissue; presence of Map in feces; presence of Map in tissue, but not feces; and the presence of Map in both tissue and feces. Results from the first classification, presence of Map in tissue, produced a single strong association ARS-BFGL-NGS-113303 (MAF=0.36, Bonferroni p=0.014) with resistance to Map penetration of the tissue and 4 moderate associations (FIG. 17). RefSeq genes located within 1 Mb of ARS-BFGL-NGS-113303 identified the gene endothelin 2 (EDN2) located 31 Kb downstream from ARS-BFGL-NGS-113303. EDN2 has been found to be highly expressed in the gastrointestinal tract of the mouse. Takizawa et al. (2005) found that in intestinal epithelial cells EDN2 could be secreted into the lamina propria and the dome region in Peyer's patch, and that it might modulate immune cells for mucosal defense. Further, McCartney et al. (2002) found EDN2 to be highly expressed in mucosal biopsies of humans, including samples taken from patients with inflammatory bowel disease (i.e., Crohn's disease). However, no associations were found between human IBD and mRNA expression.

[0044] Association with the presence of Map in feces, however, did not yield any strong associations and only 4 moderate associations, 3 of which were on different chromosomes to those identified as associated with Map infection of tissue. The fourth locus, on chromosome 5, was 30 Mb from the SNP found to be moderately associated with Map infection of tissue. Comparing the rank order of SNPs, by significance, for the tissue positive results to the fecal positive results showed the two to have a significantly different significance ordering (data not shown). It is well established that the sensitivity of Map fecal culture in the early stages of infection is low. In this study, fecal culture only detected the presence of Map infection 40% of the time in the presence of tissue infection. This result shows that the differences in sensitivities between the diagnostic tests and the resulting definition of phenotype significantly impacts the loci detected to be associated with Map and their corresponding interpretation. This result led to the question of whether there was a difference in loci associated with a tissue positive, but fecal negative classification and a tissue positive and fecal positive classification. If having fecal culture results provides no additional information, one would expect the rank order of SNPs, by significance, to be similar in these analyses. However, this is not what was found. Results from tissue infection with no fecal shedding did not identify any strongly associated regions and only 3 moderately associated regions, which included the same SNP found to have a strong association (ARS-BFGL-NGS-113303) to tissue positive culture. Results from the analysis of the tissue positive infection in conjunction with fecal shedding phenotype produced one strong association on chromosome 9 (BTB-01957421, MAF=0.01, Bonferonni p=0.005) and 4 moderate associations, 3 of which were neighbors of BTB-01957421 (FIG. 18). There are no Bovine RefSeq genes within 1 Mb of BTB-01957421. The identification of different loci associated with tissue infection, compared to tissue infected and fecal shedding, indicates that there are loci important to different stages of the disease.

[0045] The infection of cells by Map is the first step toward Johne's disease, but it may not be a guarantee of disease. Similarly, fecal shedding of Map may occur because of environmental exposure, but without tissue infection the animal may not become diseased. Within hours of Map ingestion, the bacterium attaches to the host's intestinal mucosa and penetrates the mucosa/M cells overlying Peyer's patches (Wu et al. 2007; Momotani et al. 1988). Map that survive phagocytosis by macrophages acquire nutrients for growth and replicate. Map is later disseminated in macrophages and is associated with early paucibacillary lesions. This cell-mediated immunological response restricts the expansion of Map (Clarke 1997; Waters et al. 1999). At this stage, and depending on other factors (such as the dose of Map, the genetics of the host, local tissue cytokine concentrations, stress, and hormone levels of the cow) the animal may either clear Map or may develop a persistent Map infection that culminates in Johne's disease (Harris and Barletta 2001). For those animals that progress to Johne's disease, humoral-mediated responses replace cell-mediated responses. These animals exhibit fecal shedding, positive serological tests, greater Map replication rates, multibacillary lesions, and clinical disease (Whittington and Sergeant, 2001). The very different processes involved in early disease and late disease may also be reflected in the different loci found to be associated with the classification of tissue infection as compared to clinical infection. Because the etiology of the disease is not fully understood, loci associated with tissue infection or the “clinical” diagnosis are not referred to as Johne's susceptibility or resistance loci, as these loci may have different roles in the pathogenesis of Johne's disease at different stages. Therefore, the use of both tissue and fecal diagnostic testing provides a more complete profile of the health status of the cow.

[0046] While others have found evidence of association with Johne's disease on bovine chromosome 20 (BTA20), the present study shows no evidence for a locus associated with Johne's disease on BTA 20 in any of the four phenotype classifications analyzed. Additionally, in the Crohn's disease literature two genes consistently have the most significant association with Crohn's: IL23R and NOD2 (also known as CARD15). While others have shown NOD2 to have “no association” with Johne's disease (Taylor et al. 2006), no one has yet looked at the IL23R ortholog on bovine chromosome 3 (located at 83 Mb). Focusing on all SNPs within 1 Mb of both NOD2 and IL23R, no loci in the vicinity of these genes were found to be associated with any Map infection phenotype (data not shown).

[0047] As disclosed under working EXAMPLE 1 herein below, the loci associated with tolerance to Johne's disease in cattle were examined. One critical reason for doing genome-wide studies is in the characterization of the phenotype. In working EXAMPLE 2 the phenotype was defined as tolerance to bovine paratuberculosis. The definition of tolerance was that animals that were infected had high doses of Map in the tissues but lower levels of Map in the feces. Once the animal becomes infected it can spread the Map to other animals through the fecal material (Harris and Barletta 2001). The ability to reduce the spreading of the disease by having low doses of Map in the feces, in comparison with the levels of Map in the tissue, was characterized as tolerance. Because tolerance can only be measured in infected animals (tissue positive), and fecal shedding occurs after a long incubation period, the age of infection and infection pressure could play an important role in the definition of tolerance. From the data a small negative correlation was observed between infection and age (r=−0.09) or fecal shedding and age (r=−0.18), indicating no effect of age with disease status. Using the culture of tissue as a method to identify the true disease status of the animals reduced the misclassification of the phenotype in animals with early disease frequently found when animals were diagnosed using fecal culture or ELISA (Sockett et al. 1992, Whitlock et al. 1996, 2000).

[0048] Traits, including most diseases, are distributed as quantitative traits and usually determined by complex genetic and environmental factors and potentially gene-gene interactions and gene-environment interactions (Li et al. 2006). In many cases of complex diseases, the infectious status of the animal is characterized as some threshold value (Churchill and Doerge, 1994). The use of genome-wide association studies with a quantitative trait provides relevant information of genetic variation associated with disease. A limiting factor often faced in the case-control association studies is the limited sample size. One alternative to reduce the effects of the small number of cases and controls is to analyze tolerance as a quantitative trait, in this case including all the positive animals with a tolerance index. The peak CFUₜ and average CFUₜ were highly correlated with peak CFU_{f} and average fecal CFU_{f} (r=0.73 and r=0.79, respectively).

[0049] In a review article, Abubakar and colleagues (2008) suggested that there is sufficient evidence for the presence of Mycobacterium avium subspecies paratuberculosis in the gut of patients with Crohn's disease. A summary risk difference of 0.23 (95% CI, 0.14-0.32) was calculated, which remained consistent after sensitivity analysis excluding various sets of studies, and suggested an association with Johne's disease. Consequently, the persistence of intolerant animals on the farm will help to spread the disease and consequently may increase the incidence of Crohn's disease in humans. None of our SNPs were located close to genomic regions known to be associated with Crohn's disease in humans. However, one SNP located on BTA 15 was localized 522 kb from the gene Interleukin-18 (IL18), which is a proinflammatory cytokine and considered to be a key factor in inflammatory bowel diseases (IBD) (Banerjee and Bond, 2008). This SNP is also located 428 kb from the PTS gene. Mutations in PTS result in serotonin and catecholamine deficiency that affect a range of immune responses involving cytokines, lytic activity, and antibody production (Thony and Blau 1997, Alaniz et al. 1999).

[0050] The SNP associated with T_{Average} residing on BTA 2 is located 45 kb from CXCR4, and 188 Kb from MCM6. The inhibition of the activity of CXCR4 with AMD3100 decreases invasion of human colorectal cancer cells in vitro (Li et al. 2008). MCM6 has been associated with lactose intolerance and also with the recurrence of squamous papillary tumor (SP) (Xu et al. 2007; Imtiaz et al. 2007).

[0051] According to particular aspects, the identification of loci associated with tolerance to Johne's disease can be used as a new prediction method to select animals to reduce spreading of Mycobacterium avium subspecies paratuberculosis in the environment and reducing the incidence and losses caused by Johne's disease.

### Example 1

### Loci Associated with Mycobacterium Avium Subsp. Paratuberculosis (Map) Infection Status in U.S. Holstein Cattle were Identified by Whole Genome Association Analysis

[0052] Overview. The experiments and data disclosed in this working EXAMPLE 1 identify loci associated with Mycobacterium avium subspecies paratuberculosis (Map) infection status in US Holsteins. The data were obtained using the Illumina BovineSNP50 BeadChip™ whole genome SNP (single nucleotide polymorphism) assay.

[0053] The population of animals used in this study was Holstein cows from four geographically distinct herds culled for any reason, including having a Map positive diagnostic test. Specifically, two hundred forty-five cows from dairies in New York, Pennsylvania, and Vermont were followed to culling between January 1999 and November 2007 and subsequently were assessed for the presence of Map in both fecal samples and necropsy tissue. An animal was considered tissue-infected if any sample contained at least one colony-forming unit per gram of tissue (cfu/g) and the same definition was employed for fecal samples. Each animal was genotyped with the Illumina BovineSNP50 BeadChip. After quality assurance filtering, 218 animals and 45,683 SNPs remained. Genetic loci associated with the following four different case/control classifications were identified:

[0054] presence of Map in the tissue;

[0055] presence of Map in feces;

[0056] presence of Map in both tissue and feces; and

[0057] presence of Map in tissue but not feces.

[0058] A case-control genome wide association study (GWA) was conducted to test the four different classifications of Map infection status (Cases) when compared to a Map negative control group (Control). Regions on chromosomes 1, 5, 7, 8, 16, 21, and 23 were identified that showed a moderate significance (P<5×10⁻⁵). Regions on chromosomes 3 and 9 were identified with a high level of association to the presence of Map in tissue and both tissue and feces, respectively (P<5×10⁻⁷, genome-wide Bonferonni P<0.05).

[0059] Determination of the presence of Map in tissue and/or feces. Map infection status was evaluated from culture diagnostic testing of fecal samples and necropsy tissues. Genetic loci associated with the above four different case/control classifications were searched. The first classification tested if there were loci associated with a tissue positive result for Map, regardless of fecal status. These loci are associated with the bacterium's ability to infect the host's cells.

[0060] The second classification tested for loci associated with fecal shedding, which may be independent of those associated with Map tissue infection and may represent loci responsible for a cow's ability to transmit Map through its feces. Further, this analysis is comparable to studies that inferred disease status by the presence of fecal Map, in the absence of tissue data.

[0061] When considering both fecal and tissue results to classify animals, four possible subgroups arise:

[0062] Map negative controls (fecal−, tissue−);

[0063] fecal shedding but tissue negative (fecal+, tissue−);

[0064] tissue infected but not fecal shedding (fecal−, tissue+); and

[0065] “clinical” (fecal+, tissue+).

Genome wide association case-control association tests were performed for loci associated with the following subgroups: tissue infected but not fecal shedding animals (cases) relative to negative animals (controls), and “clinical” animals (cases) relative to negative animals (controls). These two classifications were expected to identify loci associated with tissue-infected animals that were not fecal shedding as compared to “clinical” animals, and thus to allow determination of whether any loci are shared. According to particular aspects, the identification of loci associated with each of these phenotypes can be used to develop a marker-assisted selection program to aid in the control of Johne's disease. Moreover, identifying Map-tolerant or resistant genotypes represents a new way of evaluating the impact of disease on animals. Selection of animals for tolerance would put different pressures on the host (cattle) and the pathogen (Map) and may be more or less effective as a means of controlling Johne's disease than selection for disease resistance.

### Materials and Methods:

[0066] Study Population and Phenotypes. Two hundred and forty-five Holstein cows from dairies in New York (Herd A), Pennsylvania (Herds B and D), and Vermont (Herd C) were followed to culling between January 1999 and November 2007 and subsequently were assessed for the presence of Map in both fecal and necropsy tissue. Tissue samples from the ileum, ileo-cecal valve, and two adjacent ileo-cecal lymph nodes were cultured for the presence of Map following the protocols previously described in Whitlock et al. (1996, 2000). In addition, fecal samples were taken at necropsy and were cultured for the presence of Map using the same procedure. Each animal was considered tissue-infected if any cultured sample from any of the four tissues had greater than zero colony-forming units per gram of tissue (cfu/g). Fecal culture status was similarly classified. Ninety-five animals were classified as tissue positive, and 45 animals were classified as fecal positive. As expected, the sensitivity of the culture of tissue was significantly greater than the fecal culture in detecting the presence of Map. Within the tissue positive samples, fecal culture detected the presence of Map in only 40% of the samples (38 out of 94, when both tissue and fecal results were present, one tissue positive sample had a missing fecal sample). Six animals tested positive in fecal culture but not in tissue culture. The fecal cfu/g values in these animals were less than five and may represent what many consider to be fecal “pass-through”, which is when an animal has a fecal positive test due to environmental conditions but is not Map infected. The distributions of the fecal and tissue results by herd are shown below in Tables 1a and 1b. Each sample was further characterized for potential confounding variables such as age at culling (median 56.5 months of age, quantiles 1 and 3 equal to 44.3 and 72.25 mo., respectively) and herd of origin.

TABLE 1a
Map tissue culture status by herd before
quality control filtering of the data.

| Data Set | Negative | Positive | Unknown | Total |
|---|---|---|---|---|
| Herd A | 45 | 30 | 1 | 76 |
| Herd B | 40 | 9 | 0 | 49 |
| Herd C | 14 | 17 | 0 | 31 |
| Herd D | 38 | 39 | 12 | 89 |
| Totals | 137 | 95 | 13 | 245 |

Tissue positive status was determined as at least one sample from any of 4 tissues yielding at least one colony forming unit of Map (peak cfu/g > 0).

TABLE 1b
Map fecal culture status by herd before
quality control filtering of the data.

| Data Set | Negative | Positive | Unknown | Total |
|---|---|---|---|---|
| Herd A | 71 | 4 | 1 | 76 |
| Herd B | 47 | 2 | 0 | 49 |
| Herd C | 19 | 11 | 1 | 31 |
| Herd D | 51 | 28 | 10 | 89 |
| Totals | 188 | 45 | 12 | 245 |

Fecal positive status was determined as at least one fecal sample containing at least one colony forming unit of Map (peak cfu/g > 0).

[0067] Genotyping. DNA was extracted from the tissue of each animal using the Puregene DNA extraction kit per manufacturer's instructions (Gentra, Minneapolis, Minn.). Sample DNA was quantified and genotyped using the Illumina BovineSNP50 BeadChip™ (Matukumalli et al. 2008). The Illumina BovineSNP50 BeadChip™ assay contains 53,243 SNPs with a mean spacing of one SNP every 49.4 kb (median spacing of 37 kb; quartiles 1 and 3 equal to 27.6 kb and 54 kb, respectively; and a maximum distance of 1.45 Mb). The BovineSNP50 BeadChip™ also contains an additional 1,828 SNPs, which are located on contigs that are not mapped to a chromosome (Chr. Un). All samples were brought into a single BeadStudio™ file, and genotypes were identified using a custom genotype clustering file developed at the University of Missouri using more than 7,000 samples from multiple Bos taurus cattle breeds.

[0068] Quality Assurance. Seven animals (one from Herd A, five from Herd B and one from Herd D) were excluded from the analysis for quality with a genotype no-call rate greater than 10%. An excess no-call rate is an indicator of low quality DNA. To assess technical variation, one animal was hybridized to two arrays, resulting in a greater than 99% identity of called genotypes (2 mismatches). Multi-dimensional scaling (MDS) of the matrix of genome-wide identity-by-state (IBS) distances was used to provide a two-dimensional projection of the data onto axes representing components of genetic variation. Animals whose genetic ancestry differs significantly appear as outliers on the MDS plot. To avoid confounding the multi-dimensional scaling by extended linkage disequilibrium, we thinned the genotype data to a set of 10,098 SNPs, in which no pair of SNPs was correlated with r²>0.2. For this set of SNPs, the genome-wide IBS pair-wise identities between each pair of animals was computed using PLINK (Purcell et al. 2007; Version 1.04). These IBS-relationships were converted to genetic distances by subtracting them from one, and the matrix of pair-wise IBS distances was used as input for multi-dimensional scaling. The projection of the data onto the first two multi-dimensional scaling axes is shown in (FIG. 16). The multidimensional scaling (MDS) plot provides a spatial representation of data to facilitate interpretation and reveal structural relationships in the data. The MDS analysis identified fifteen animals that were clearly distinct from the majority of animals, two animals from Herd A, five animals from Herd B, one from Herd C and seven animals from Herd D. These animals were removed from further analysis, resulting in a substantial reduction of the genomic inflation factor (based on median chi-squared, data not shown).

[0069] After removing animals for genotype quality and excessive genomic variance, the age ranges of the remaining control animals (tissue negative) were compared to those for tissue Map positive animals. The mean age of control animals was 58.1 months, while the mean age of the tissue Map positive animals was 60.5 months of age. Five control animals were significantly younger (approximately 12 months of age when culled) than the youngest of the tissue Map positive animals (approximately 23 months of age when culled). These animals were excluded from the study as their youth may have affected the ability to detect Map in their tissues and/or feces. The resulting mean age at culling for control animals (tissue negative) was 60 months, with a range of 21.8 to 144 months and the mean age at culling was 60.5 months for Map tissue positive animals with a range of 22.9 to 135 months. After removing 27 samples for quality, genetic variability and age, 218 animals remained in the study with an average genotype call rate of 98.9%, of which 90 animals tested positive for Map in at least one tissue sample (tissue positive) and 41 animals tested positive for Map in fecal samples (fecal positive). Thirty-five animals tested positive in both fecal and tissue samples (“clinical”), 6 animals tested positive in fecal culture but not tissue (“pass-through”), 54 animals tested positive in at least one tissue sample but not fecal sample (“infected”), 112 samples tested negative for Map in both fecal and tissue samples (“negative”), 11 samples were untested for either fecal or tissue, and seven of these animals were untested for both fecal and tissue samples (FIG. 20). These animals were left in the study to contribute to SNP level quality assurance but did not contribute to any association test statistic. The distribution of animal numbers by herd is presented in Tables 2a and 2b. 1,276 SNPs with >10% genotype no-call rate and 8,317 with a minor allele frequency (MAF)<0.01, of which 6,356 were monomorphic, were excluded. Genome-wide, 45,683 SNPs (82.9%) passed these quality control filters.

TABLE 2a
Map culture of tissue status by herd after
quality control filtering of the data.

| Data Set | Negative | Positive | Unknown | Total |
|---|---|---|---|---|
| Herd A | 43 | 29 | 1 | 73 |
| Herd B | 31 | 8 | 0 | 39 |
| Herd C | 13 | 17 | 0 | 30 |
| Herd D | 32 | 36 | 8 | 76 |
| Totals | 119 | 90 | 9 | 218 |

Tissue positive status was determined as at least one sample in any of 4 tissues containing at least one colony forming unit of Map (peak cfu/g > 0).

TABLE 2b
Map fecal culture status by herd after
quality control filtering of the data.

| Data Set | Negative | Positive | Unknown | Total |
|---|---|---|---|---|
| Herd A | 68 | 4 | 1 | 73 |
| Herd B | 37 | 2 | 0 | 39 |
| Herd C | 18 | 11 | 1 | 30 |
| Herd D | 45 | 24 | 7 | 76 |
| Totals | 168 | 41 | 9 | 218 |

Fecal positive status was determined as at least one fecal sample containing at least one colony forming unit of Map (peak cfu/g > 0).

[0070] Statistical Analysis. Standard one-degree-of-freedom (df) allelic, 1-df dominance, 1-df recessive and 2-df (genotypic) tests of association with genotype between cases and controls were calculated. When evidence for stratification occurred, a within-herd Cochran-Mantel-Haenszel (CMH) test 2×2×K (K=4 herds) of association with genotype was performed. All calculations and plots were performed using the R statistical environment and PLINK (Purcell et al. 2007; Version 1.04). For genome-wide association, uncorrected P values less than 5×10⁻⁷ provided strong evidence of association and uncorrected P values between 5×10⁻⁵ and 5×10⁻⁷ were considered to provide moderate evidence (Wellcome Trust Case Control Consortium 2007). Physical positions and alleles were expressed in terms of the forward strand of the reference genome (Baylor College of Medicine Human Genome Sequencing Center Btau 4.0).

[0071] Quantile-quantile plots. A quantile-quantile plot (Q-Q plot) is a useful graphical method for visualizing the differences between a random sample from a population and the expected probability distribution under the null hypothesis. In a genome-wide association study, deviation of the sample distribution p-values from the expected null hypothesis distribution p-values can be attributed to extra variance in the test statistics due to population substructure (Devlin & Roeder 1999). In this study, each Q-Q plot compares the chi-squared (or Cochran-Mantel-Haenszel; CMH) p-values for each SNP versus the expected p-value distribution under the null hypothesis of no association at any locus. Each Q-Q plot was then inspected for a significant deviation from the null distribution. In addition, the median of the chi-squared values was calculated and tested for a statistical difference from the expected value under Hₒ. When the Q-Q plot and median chi-square showed evidence of population stratification, stratified analysis was performed, clustering the data within herds and performing a 2×2×4 CMH test. The resulting Q-Q plot and median chi-square was investigated after the stratified analysis to determine if clustering by herd was successful in adjusting for population stratification.

### Results:

[0072] A case-control genome wide association study (GWA) was conducted to test four different classifications of Map infection status defined by results from Map culture from both tissue and fecal samples.

[0073] Association of loci with Map infected tissue (tissue positive vs. tissue negative). Single SNP analysis was conducted to test the association of loci with a culture of tissue Map positive result. Cases in this analysis were defined as animals with a Map positive tissue result (n=90) and controls were animals with a Map negative tissue result (n=119) regardless of fecal shedding status. A strong association was found with the ARS-BFGL-NGS-113303 SNP located on BTA 3 using the basic allelic model at position 111,682,510 by (p=3×10⁻⁷; P=0.014 after Bonferonni correction). Seven SNPs were found to be moderately significant (p<5×10⁻⁵) with Map infected tissue, located on chromosomes 1 and 21 for the basic allele frequency difference model and on chromosomes 5 and 16 using the dominance model (Dom; Table 3A). There was no evidence for population substructure on the Q-Q-plot (FIG. 1), or based on the genomic inflation factor (based on median chi-square value, λ_{gc}=1).

[0074] Table 3B shows SNPs associated with Map infection status.

TABLE 3A
Genomic regions associated with Map (* Bonferonni significance, when applicable, in
brackets).

| | | | | | Odds | | RefSeq Genes |
|---|---|---|---|---|---|---|---|
| SNP | Chr | Pos (bp) | Phenotype | Test | Ratio | p-value | (1 Mb) |
| Hapmap57114- | 1 | 3,083,368 | Tissue | Allelic | 2.31 | 3.264e−05 | SOD1 |
| rs29012843 | | | | | | | |
| ARS- | 1 | 3,083,498 | Tissue | Allelic | 2.31 | 3.264e−05 | SOD1 |
| USMARC- | | | | | | | |
| Parent- | | | | | | | |
| DQ381153- | | | | | | | |
| rs29012842 | | | | | | | |
| BTB- | 1 | 14,995,903 | Infected | Allelic | 0.31 | 4.269e−05 | NONE |
| 00757888 | | | | | | | |
| ARS-BFGL- | 3 | 111,682,510 | Tissue | Allelic | 0.33 | 3.062e−07 | FOXJ3, EDN2, |
| NGS-113303 | | | | | | *(0.014) | CTPS, CITED4, |
| | | | | | | | NFYC |
| | | | Infected | Allelic | 0.33 | 3.290e−05 | |
| Hapmap27802- | 5 | 73,634,207 | Tissue | Dom | 0.30 | 3.708e−05 | TRA1, ALDH1L2 |
| BTA-49707 | | | | | | | |
| BTA-95292- | 5 | 106,209,963 | Fecal | CMH | 91.2 | 4.163e−05 | T2R67, MAGOHB, |
| no-rs | | | | | | | KLRA1, KLRJ1 |
| ARS-BFGL- | 7 | 47,688,319 | Clinical | CMH | 3.689 | 3.723e−05 | IGH3 |
| NGS-37513 | | | | | | | |
| ARS-BFGL- | 8 | 74,335,842 | Fecal | CMH | 0.30 | 3.389e−05 | STC1 |
| NGS-3865 | | | | | | | |
| BTB- | 9 | 647,609 | Clinical | CMH | 41.50 | 2.511e−05 | None |
| 00478134 | | | | | | | |
| BTB- | 9 | 698,262 | Clinical | CMH | 41.50 | 2.511e−05 | None |
| 00478151 | | | | | | | |
| Hapmap28625- | 9 | 786,610 | Clinical | CMH | 41.50 | 2.511e−05 | None |
| BTA-149369 | | | | | | | |
| BTB- | 9 | 813,310 | Clinical | CMH | NA | 1.029e−07 | None |
| 01957421 | | | | | | *(0.005) | |
| | | | Fecal | CMH | NA | 1.661e−05 | |
| BTB- | 16 | 27,186,964 | Tissue | Dom | 3.71 | 4.632e−05 | PARP-1, RPAC2, |
| 01274618 | | | | | | | PS-2, CABC1, |
| | | | | | | | SCCPDH, DMNT2 |
| BTB- | 16 | 27,237,455 | Tissue | Dom | 3.97 | 2.579e−05 | PARP-1, RPAC2, |
| 01274755 | | | | | | | PS-2, CABC1, |
| | | | | | | | SCCPDH, DMNT2 |
| Hapmap60593- | 21 | 26,660,590 | Infected | Allelic | 5.29 | 8.115e−06 | BCL2A1, |
| rs29025761 | | | | | | | ZFAND6, |
| | | | | | | | MESDC-2, IL16, |
| | | | | | | | MCEE |
| | | | Tissue | Allelic | 4.18 | 3.453e−05 | |
| Hapmap53770- | 23 | 48,404,721 | Fecal | CMH | 3.0730 | 4.392e−05 | EEF1E1 |
| ss46526325 | | | | | | | |

TABLE 3B

SNPs associated with Map infection status

| | | RefSeq Genes | btau40 | | |
|---|---|---|---|---|---|
| Phenotype | p-value | Within 1 Mb | _contig | btau40_pos | Nucleotide Sequence |
| Infection | 3.06E−007 | F0XJ3, EDN2, | 3 | 111682510 | TAAAAAGACAAGAGAC |
| | | CTPS, CITED4, | | | ATCCAGTAGAGGCAACA |
| | | NFYC | | | GGGTGCCCAGGCCTGGG |
| | | | | | CCTCAGGAGA[A/C]AAG |
| | | | | | TTTGGGCTGGAGGTGGA |
| | | | | | CTCTAGCAATCATTGGC |
| | | | | | TAGAGATGGAAATTCAG |
| | | | | | CCTATA |
| | | | | | (SEQ ID NO: 11) |
| Infection | 8.12E−006 | BCL2A1, | 21 | 26660590 | CCTGTAGGATGCACACT |
| | | ZFAND6, | | | GAACTGAGCTGTGGATG |
| | | MESDC-2, IL16, | | | AAGCCCAGAGAAGGTG |
| | | MCEE | | | AATAATTGAC[T/G]CAA |
| | | | | | GGTCACAGGCTTGACAG |
| | | | | | GGTGACACTGAAGTACA |
| | | | | | AACTTTCTTGTCCGGCTC |
| | | | | | TGCTC |
| | | | | | (SEQ ID NO: 12) |
| Disease | 1.03E−007 | None | 9 | 813310 | AGGGGAGAAGACAGAC |
| | | | | | AGAGGATACCCAGCAAT |
| | | | | | GCCAGCTGGGAGGCTGG |
| | | | | | CTCCACCACC[C/G]GGG |
| | | | | | GCTGCTGTTGTCTCTGAT |
| | | | | | CCAGCTTTTCTAGTCTG |
| | | | | | GTGGGATGGGGTAACAT |
| | | | | | CTGTG |
| | | | | | (SEQ ID NO: 13) |
| Disease | 2.51E−005 | None | 9 | 647609 | CTAATCTCTTATTAATG |
| | | | | | GTAGCTATAATACTTTT |
| | | | | | ATATTTAGGACTTTCAG |
| | | | | | AAAAACCTG[A/G]TCAA |
| | | | | | AGTCAACAATTTCAGCA |
| | | | | | TTATCTTGGGGAAACTG |
| | | | | | TGTGTGAATGAGCTCCA |
| | | | | | CTGCC |
| | | | | | (SEQ ID NO: 14) |
| Disease | 2.51E−005 | None | 9 | 698262 | GGGGATTTTTCAGTAAG |
| | | | | | AGGTTAATAACCAGTGA |
| | | | | | GGTAAACATGTATAACA |
| | | | | | ACCTGCTTA[T/C]ATGCA |
| | | | | | CACTGGGAAGTGTCATG |
| | | | | | AACCTTTCTCACCTCCAT |
| | | | | | GCTGAGTTTCCAGAGAA |
| | | | | | CCA |
| | | | | | (SEQ ID NO: 15) |
| Disease | 2.51E−005 | None | 9 | 786610 | ATACTGTCAGAGCAGGC |
| | | | | | ATCTCAGAATCAGACAC |
| | | | | | TTTACCTGATCCCTCTCT |
| | | | | | TACAGAGT[C/G]TGAAA |
| | | | | | CAGCTTTCAAGTATTGG |
| | | | | | GAAGAGGTAGATGCTCC |
| | | | | | CCATACCAAAAGCATCC |
| | | | | | CTGC |
| | | | | | (SEQ ID NO: 16) |
| Infection | 2.58E−005 | PARP-1, RPAC2, | 16 | 27237455 | AAAAAGTAGAGTGATG |
| | | PS-2, CABC1, | | | ACAGACCCATTATATAA |
| | | SCCPDH, | | | TTGAAACATGTTATAAA |
| | | DMNT2 | | | GCCTCAACAA[A/G]TAA |
| | | | | | CACATGAATAAGAAGTC |
| | | | | | CAGAAATGGGGTCAGTT |
| | | | | | ACATAAAGGAATTTAAA |
| | | | | | ATTTAC |
| | | | | | (SEQ ID NO: 17) |
| Infectoin | 4.63E−005 | PARP-1, RPAC2, | 16 | 27186964 | GATGAGATGCATCGAAA |
| | | PS-2, CABC1, | | | ACTGCAATGCCGGCAGC |
| | | SCCPDH, | | | TAGCACTGGTCAACAGA |
| | | DMNT2 | | | AAGGGCCCA[A/G]TTCTC |
| | | | | | CATGCTAATGCCCGATT |
| | | | | | GCACAATCAATGCTTCC |
| | | | | | CAAGTTGAAGGAATTAG |
| | | | | | GCTA |
| | | | | | (SEQ ID NO: 18) |
| Infection | 3.26E−005 | SOD1 | 1 | 3083368 | ATCTGCTTGGATCTTCTC |
| | | | | | ATTAGCGAATTCCAAGA |
| | | | | | AGATGAGCCAGATCAGC |
| | | | | | CCAGGGAC[T/C]GTGAA |
| | | | | | GATCCCAGAGGAGGAC |
| | | | | | ACACACTCCCATCCTGT |
| | | | | | GAGCATTTTTCTTATGTG |
| | | | | | TCAA |
| | | | | | (SEQ ID NO: 19) |
| Infection | 3.26E−005 | SOD1 | 1 | 3083498 | tctgagtgttcattgctgcaccgcctctc |
| | | | | | caagctcccaagggcatctctctacgta |
| | | | | | ata[T/G]taatgcctggccaggtccc |
| | | | | | atccattctgacagacaaaggacaRR |
| | | | | | cgctactttacattt |
| | | | | | (SEQ ID NO: 20) |
| Disease | 3.39E−005 | STC1 | 8 | 74335842 | ACCTGATGACTATTAAG |
| | | | | | AAATTAACACGTAATCT |
| | | | | | ACATGACTGGCCAGCAG |
| | | | | | CCCCACTCA[A/G]GGAG |
| | | | | | TTCCTTACTCCTAAGCA |
| | | | | | GTTCTTAGGAGTTAGAA |
| | | | | | CTCTTCAGTTCAGTTCA |
| | | | | | GTTGC |
| | | | | | (SEQ ID NO: 21) |
| Infection | 3.71E−005 | TRA1, ALDH1L2 | 5 | 73634207 | AATAACTTAAAAATTAT |
| | | | | | TGAAGTGTAGTTTATGT |
| | | | | | ACAATGTAATGTTAATT |
| | | | | | TCATATGTA[T/C]GGCAA |
| | | | | | AACCACTCAGTTATACA |
| | | | | | GATATGTATACATGTAT |
| | | | | | ACTAGAAAAGAACCATT |
| | | | | | CTTA |
| | | | | | (SEQ ID NO: 22) |
| Disease | 3.72E−005 | IGH3 | 7 | 47688319 | ATTCTCTCTGGTCATGG |
| | | | | | CTATTCATTCGTCCCTTC |
| | | | | | CTACCTACACTTGCCCT |
| | | | | | GTTCCAGG[T/C]TGGCCA |
| | | | | | TCCTTCTCTCCATCTGCC |
| | | | | | CATTTCCTCTGGAAAAG |
| | | | | | CAACCACCTTGCAGAGA |
| | | | | | AG |
| | | | | | (SEQ ID NO: 23) |
| Disease | 4.16E−005 | T2R67, | 5 | 106209963 | ACACTTTCCAGTTTTAG |
| | | MAGOHB, | | | ATATGCTCATATAGCAA |
| | | KLRA1, KLRJ1 | | | TGCTTCCATATCTAAGC |
| | | | | | TTTAGTCTC[T/C]TGAAG |
| | | | | | GGTTTGTTGTTGTTGTTC |
| | | | | | AATCACCTAGTCATGTC |
| | | | | | CAACTCTGCAATCCCAT |
| | | | | | GGA |
| | | | | | (SEQ ID NO: 24) |
| Infection | 4.27E−005 | NONE | 1 | 17106221 | ATGTCTTGAGTAATACT |
| | | | | | TTTACTTGTTCAGAAAG |
| | | | | | TTTATTTGTTTATTTTCC |
| | | | | | ATAATGTA[T/C]GTACTG |
| | | | | | CCAGAATGTTACTCAGT |
| | | | | | ATACTCTTGTATCTATCA |
| | | | | | AACTTTCAGCAGTTAGG |
| | | | | | TC |
| | | | | | (SEQ ID NO: 25) |
| Disease | 4.39E−005 | EEF1E1 | 23 | 48404721 | GGCCCACGAGTCCTAGC |
| | | | | | CAGGTGGCCTTGCCTTG |
| | | | | | TGGCCCTGTTGAGTTGC |
| | | | | | TTTGATCAC[A/G]TGACT |
| | | | | | TGTTCATACGTGGCTGG |
| | | | | | TCCATAGGTTGGAGCAG |
| | | | | | ATTTCACACACAAACCC |
| | | | | | CTGA |
| | | | | | (SEQ ID NO: 26) |
| Qualitative | 1.83E−007 | PTS, IL18, | 15 | 21254062 | AGGGAGGGTTTGGCACT |
| (Average)/ | | TEX 12, | | | GGCAAGGGGTCCATGGA |
| Qualitative | | BCO2, PIH1D2,T1 | | | ACATGGACAGAATGAA |
| (Peak) | | MM8B, CRYAB, | | | GCTCTGGGAG[T/G]GAG |
| | | HSPB2, NCAM1, | | | GGGCAGAAGCACATGA |
| | | DR2 | | | GGAGGTCAAGCTTCAGG |
| | | | | | CCCTTCACCTTGACACA |
| | | | | | ATGGGAA |
| | | | | | (SEQ ID NO: 27) |
| Quantitative | 4.23E−007 | SLC35F5, | 2 | 68641435 | CAAAGATTTTTGGTCTG |
| | | ACTR3, LYPD1 | | | ATATAAATGTGTGTCTT |
| | | | | | CTTTTTAGGCCTGTGATT |
| | | | | | TTTCAATG[T/C]AAAACA |
| | | | | | AAATTTAAAACTTCTTA |
| | | | | | TAATAGTATTTAGCAGG |
| | | | | | AGAAAAGAAGGAGGGA |
| | | | | | ACTA |
| | | | | | (SEQ ID NO: 28) |
| Quantitative | 1.13E−005 | SLC35F5, | 2 | 68429675 | ATGTTTTGCCCTTTGATA |
| | | ACTR3, LYPD1 | | | TTCACAAGGCTTCCCCA |
| | | | | | TCCTATCTTTCTGGCCTC |
| | | | | | TGATACC[T/G]TCTTACC |
| | | | | | ACCACCCTCCCTTTATTC |
| | | | | | TCTGTCCCTACTCAGCTT |
| | | | | | TATTTTTTTCCACAGGG |
| | | | | | (SEQ ID NO: 29) |
| Quantitative | 1.13E−005 | SLC35F5, | 2 | 68492186 | AAATGGCATGCTTCATG |
| | | ACTR3, LYPD1 | | | AAGACTCGGTGCACGGA |
| | | | | | CCTGATGGAATGCTGTG |
| | | | | | CCACCTCCA[T/C]TCTTA |
| | | | | | GGCCTCGCCAAGAGGCC |
| | | | | | CCCAGTTTCTAGTAGGA |
| | | | | | AACAGGTATTAATAATG |
| | | | | | CGAG |
| | | | | | (SEQ ID NO: 30) |
| Quantitative | 1.13E−005 | SLC35F5, | 2 | 68515035 | ACCAGATATTTGGTAAT |
| | | ACTR3, LYPD1 | | | TTGTTGAATGAATTAAA |
| | | | | | TGCAAATGGTTTTGAAA |
| | | | | | AAATAAAAG[A/G]TATT |
| | | | | | ATTGTTATCATTGTCTGT |
| | | | | | TGTACCTGTTTTCTTCCT |
| | | | | | TTAAAAGTCTTGGAAAA |
| | | | | | TTC |
| | | | | | (SEQ ID NO: 31) |
| Quantitative | 2.15E−006 | TPP2, ERCC5, | 12 | 76113728 | CATCCCATGGAATAAAA |
| | | KDELC1, ZWINT | | | AAGAATACAGCTTTACA |
| | | | | | CAAAACTGGTTAATGAT |
| | | | | | AACTTGCAT[A/G]TGAGC |
| | | | | | TCAGTCACTTCAGTCGT |
| | | | | | GTCCGATTCTGCGCAAC |
| | | | | | CCCATGGACTGTAGCCT |
| | | | | | GCCA |
| | | | | | (SEQ ID NO: 32) |
| Quantitative | 4.68E−006 | TPP2, ERCC5, | 12 | 76198676 | AACAAATGAATTAAGAG |
| | | KDELC1, ZWINT | | | ATATTTGGTTGCCATGA |
| | | | | | ATGTTATGTGGAAACAA |
| | | | | | GACAACTGG[T/C]GTGAT |
| | | | | | AAGGAATCTGGGAAATC |
| | | | | | TGCTTACTTTTGGTACCG |
| | | | | | AAAGCTGAGCTGACTTA |
| | | | | | ACC |
| | | | | | (SEQ ID NO: 33) |
| Quantitative | 1.21E−005 | ZWINT | 26 | 2605707 | AAGATTATACTAATTTT |
| | | | | | TGTAAAAAGGAGATTAT |
| | | | | | AGTATGATTAAACATTA |
| | | | | | ACATTCAAA[T/C]GCTGA |
| | | | | | TTTAAATTGTGCATATA |
| | | | | | TTTTTCTCATTTCTTATT |
| | | | | | GAATTTATGATCATTGA |
| | | | | | TGA |
| | | | | | (SEQ ID NO: 34) |
| Qualitative | 2.68E−005 | PPID, ETFDH, | 17 | 42419533 | CGCCCTTTTCCTGTAAC |
| (Average) | | TMEM144 | | | AAGAGGCTAGAATTTTC |
| | | | | | CACTTTTATTGCCTTGGA |
| | | | | | GAAGAAAC[A/G]AAGCA |
| | | | | | GATGTCTGCAGGAAACA |
| | | | | | AAGGAATCAAATTTGTA |
| | | | | | GTATTTAATTGCCAAAG |
| | | | | | GCCC |
| | | | | | (SEQ ID NO: 35) |
| Quantitative | 3.11E−005 | CDKN2B, IFNT | 8 | 22806810 | TCAGGGTAGGAAAGCTT |
| | | | | | TATGGTATAATTCATGC |
| | | | | | TCCAAAAGCTCCCCATA |
| | | | | | GGATCAGGT[T/G]AACC |
| | | | | | CACATCTTGGCCTGTCC |
| | | | | | TGTTGTGCCTCCCTTGTT |
| | | | | | CCATTTCAGGTTTCTCCT |
| | | | | | GAA |
| | | | | | (SEQ ID NO: 36) |
| Qualitative | 3.80E−005 | NONE | 6 | 51851114 | AAGATCTTGGCATGCTT |
| (Peak) | | | | | TCAATTCCTCAAGGAGA |
| | | | | | TAAGGAAAGAAAAATA |
| | | | | | AACAGCACTA[T/C]AGA |
| | | | | | AAAATATGAATTAGTCC |
| | | | | | TGGAAATGGCAGGTATC |
| | | | | | TCTAGGCCTTACATCAC |
| | | | | | ATTAGC |
| | | | | | (SEQ ID NO: 37) |
| Qualitative | 3.85E−005 | UBXN4, MCM6, | 2 | 64266248 | ACTACTTCAGCCTTACT |
| (Average) | | DARS, CXCR4 | | | CTTTTAGAATTGTAGTC |
| | | | | | AGAAAAGATTGTGAGTC |
| | | | | | GTTTGGAAA[T/C]GAGC |
| | | | | | ACTTAGCCCATTTCTATC |
| | | | | | GCACGCTGGAAACTATG |
| | | | | | AACATTTTCACTGCACG |
| | | | | | TACA |
| | | | | | (SEQ ID NO: 38) |
| Qualitative | 3.87E−005 | NONE | 6 | 51772055 | CTGCTTGGAAAATTCAT |
| (Peak) | | | | | ACCAAAAGCAGTAACA |
| | | | | | GGAAATGTGCAGAGGGT |
| | | | | | TTTCTGTGTG[T/C]CCAG |
| | | | | | CACAGTGTAAGTAAGCT |
| | | | | | TAATAATCCCTATTTTCT |
| | | | | | TAATTCATTCCACACAA |
| | | | | | AGGA |
| | | | | | (SEQ ID NO: 39) |
| Quantitative | 4.02E−005 | STAC, LRRFIP2, | 22 | 10999946 | CAAAGAGGTCTGAGTTT |
| | | PLCD1 | | | CTGATGGCAATTCATAA |
| | | | | | AGTGACACTGAATTCCA |
| | | | | | AGAGTAAAT[A/G]TCTG |
| | | | | | AAAAAAGCCAGAGCCA |
| | | | | | TCTAAATAGAACAGCAG |
| | | | | | AGAGAGGAGGACAGAG |
| | | | | | AAAGCAG |
| | | | | | (SEQ ID NO: 40) |
| Qualitative | 4.49E−005 | COMMD2, PFN2, | 1 | 120575773 | CAGGCCACCTGAATTGG |
| (Average) | | RNF13, | | | ATCTTTGCTTCTCTACTT |
| | | TIM4SF4, | | | TTTAGTAGTAACTTTGG |
| | | TIM4SF1, | | | TAAGTTAC[A/G]TAACCT |
| | | TM4SF18, GYG1, | | | CCCAGGGCCTCAGATTT |
| | | CPB1, AGTR1 | | | CTCACCTGTAAAGTGGG |
| | | | | | AGTAATGTGCACACCTG |
| | | | | | GTA |
| | | | | | (SEQ ID NO: 41) |
| Qualitative | 4.54E−005 | R3HDM2 | 16 | 8218820 | AAATGGCTTTTTTACAT |
| (Average) | | | | | GAAGCAACATGTACCAG |
| | | | | | GACCTCTATTATTCACT |
| | | | | | ACAAAGAAA[A/G]TAGT |
| | | | | | GAATAATGCTCCATGTC |
| | | | | | TCAGAATTCTTGTGTAT |
| | | | | | AAAATGAGAATTATCAA |
| | | | | | ATACT |
| | | | | | (SEQ ID NO: 42) |
| Quantitative | 4.72E−005 | ARPP-19, CYP19, | 10 | 59551460 | ATAGGGAGAGAGTTATA |
| | | SCG3, LYSMD2, | | | CTCCTGCAAAGGACTGT |
| | | TMOD3, LEO1, | | | TTACCCCCCTTCAAAAA |
| | | GNB5 | | | TGTGCATTA[A/G]TCATT |
| | | | | | AGCTAAGTGACAGTGGG |
| | | | | | TAGATGGAAAGGTGACT |
| | | | | | TTATTCAGTGATATTTTT |
| | | | | | CTA |
| | | | | | (SEQ ID NO: 43) |
| Qualitative | 4.76E−005 | DDX10, FDX1, | 15 | 18460127 | CTTATACATAAAGTTCA |
| (Peak) | | RDX | | | ATTTTTTTTATATGGTAT |
| | | | | | AAAATGCCCTTTAAGAT |
| | | | | | CTGGCTCA[A/G]TGTCTT |
| | | | | | CTTATCAACCTCATTTTT |
| | | | | | CACTTCCCATTTTTTTCA |
| | | | | | GTTCTGCACACAGTCCC |
| | | | | | A |
| | | | | | (SEQ ID NO: 44) |

[0075] Association of loci with Map fecal positive (fecal positive vs. fecal negative). Single SNP analysis was conducted to test the association of loci with a positive Map fecal culture. Cases in this analysis were defined as animals with a positive fecal culture result (n=41) and controls were defined as animals with a negative fecal culture result (n=168), regardless of culture of tissue status. The standard allelic, dominance, recessive, and genotypic models showed evidence that the results were influenced by population substructure (identified by Q-Q-plot, FIG. 2 and genomic inflation factor, λ_{gc}=1.10). This was likely due to Herds A, B, and C containing fewer fecal positive animals relative to Herd D. To account for population substructure, a stratified analysis (CMH test) was performed within each herd. Investigation of the resulting Q-Q-plot (FIG. 3) and the genomic inflation factor (λ_{gc}=1.0) shows this test successfully accounted for population substructure. CMH test results showed no strong associations with a P value of less than 5×10⁻⁷; however, four SNPs were found to be moderately significant (p<5×10⁻⁵) located on chromosomes 5, 8, 9, and 23 (Table 1 above).

[0076] Association of loci with Map tissue infection but fecal culture negative (infected). Single SNP analysis was conducted to test the association of loci with Map tissue infection but with a negative fecal culture result. Cases in this analysis were defined as animals with a positive culture of tissue result and a negative fecal culture (n=54), and controls were defined as animals with a negative culture of tissue result and a negative fecal culture (n=112). No strong association with any SNPs was identified using the allelic, dominant, recessive, or genotypic model, but three SNPs were identified with moderate P values using the allelic model. Two SNPS located on chromosomes 3 and 21 were the same as those found associated with tissue positive status. The third SNP was a newly identified locus found on chromosome 1, 14 Mb downstream of the SNPs found with a moderate association with a tissue positive result (Table 3A). Analysis of “infected” animals did not show evidence for population substructure in the Q-Q-plot (FIG. 4) or genomic inflation factor (λ_{gc}=1).

[0077] Association of loci with the class Map tissue infected, fecal positive (clinical). Single SNP analysis was conducted to test the association of loci with a Map tissue infection and positive fecal culture (“clinical”). Cases in this analysis were defined as animals with a positive tissue and a positive fecal culture result (n=25), while controls were defined as animals with a negative tissue and a negative fecal culture result (n=112). The standard allelic, dominance, recessive, and genotypic models showed evidence that results were influenced by population substructure (identified by Q-Q-plot, FIG. 5 and genomic inflation factor, λ_{gc}=1.06). To account for population substructure a stratified analysis (CMH test) was performed within the herds. Investigation of the resulting Q-Q-plot (FIG. 6) and the genomic inflation factor (GC=1.0) shows this test successfully accounted for population substructure. One strong association was found with SNP BTB-01957421 located on BTA 9 using the CMH test stratifying within herd (p=1×10⁻⁷; P=0.004 after Bonferroni correction). Four other SNPs, 3 located on chromosome 9 adjacent to BTB-01957421, showed moderate association (p=2.5×10⁻⁵) as did one on chromosome 7 (p=3.72×10⁻⁵) (Table 3A).

### REFERENCES CITED FOR THIS EXAMPLE 1, AND INCORPORATED HEREIN FOR THEIR RESPECTIVE TEACHINGS

[0078] 1. USDA—Animal and Plant Health Inspection Service (APHIS) (2008), Johne's Disease in U.S. Dairies, 1991-2007. USDA Info Sheet, April.
[0079] 2. Bentley R. W., Keenan J. I., Gearry R. B., Kennedy M. A., Barclay M. L. & Roberts R. L. (2008) Incidence of Mycobacterium avium subspecies paratuberculosis in a population-based cohort of patients with Crohn's disease and control subjects. American Journal of Gastroenterology 103(5) 1168-1172.
[0080] 3. Clarke C. J. (1997) The pathology and pathogenesis of paratuberculosis in ruminants and other species. Journal of Comparative Pathology 116, 217-261.
[0081] 4. Collins M. T., Gardner I. A., Garry F. B., Roussel A. J. & Wells S. J. (2006) Consensus recommendations on diagnostic testing for the detection of paratuberculosis in cattle in the United States. Journal of the American Veterinary Medical Association 229, 1912-1919.
[0082] 5. Gonda M. G., Chang Y. M., Shook G. E., Collins M. T. & Kirkpatrick B. W. (2006) Genetic variation of Mycobacterium avium ssp paratuberculosis infection in US Holsteins. Journal of Dairy Science 89, 1804-12.
[0083] 6. Gonda M. G., Kirkpatrick B. W., Shook G. E. & Collins M. T. (2007) Identification of a QTL on BTA20 affecting susceptibility to Mycobacterium avium ssp. paratuberculosis infection in US Holsteins. Animal Genetics 38, 389-396.
[0084] 7. Harris N. B. & Barletta R. G. (2001) Mycobacterium avium subsp. paratuberculosis in veterinary medicine. Clinical Microbiology Review 14, 489-512.
[0085] 8. Hinger M., Brandt H., Horner S. & Erhardt G. (2007) Short Communication: Association Analysis of Microsatellites and Mycobacterium avium Subspecies paratuberculosis Antibody Response in German Holsteins. Journal of Dairy Science 90, 1957-1961.
[0086] 9. Hinger M., Brandt H. & Erhardt G. (2008) Heritability estimates for antibody response to Mycobacterium avium subspecies paratuberculosis in German Holstein cattle. Journal of Dairy Science 91, 3237-3244.
[0087] 10. Koets A. P., Adugna G., Janss L. L. G., van Weering H. J., Kalis C. H. J., Wentink G. H., Rutten V. P. M. G. & Schukken Y. H. (2000) Genetic Variation of Susceptibility to Mycobacterium avium subsp. paratuberculosis Infection in Dairy Cattle. Journal of Dairy Science 83, 2702-2708.
[0088] 11. Matukumalli L. K., Lawley C. T., Schnabel R. D., Taylor J. F., Allan M., Heaton M. P., O'Connell J. R., Sonstegard T. S., Smith T. P. L., Moore S. S. & Van Tassell C. P. (2008) Development and characterization of a high density SNP genotyping assay for cattle. Genome Res. (Submitted).
[0089] 12. McCartney S. A., Ballinger A. B., Vojnovic I., Farthing M. J. G. & Warner T. D. (2002) Endothelin in human inflammatory bowel disease: comparison to rat trinitrobenzenesulphonic acid-induced colitis. Life Sciences 71, 1893-1904.
[0090] 13. McKenna S. L. B., Keefe G. P., Barkema H. W. & Sockett D. C. (2005) Evaluation of three ELISAs for Mycobacterium avium subsp. paratuberculosis using tissue and fecal culture as comparison standards. Veterinary Microbiology 110, 105-111.
[0091] 14. Momotani E., Whipple D. L., Thiermann A. B. & Cheville N. F. (1988) Role of M cells and macrophages in the entrance of Mycobacterium paratuberculosis into domes of ileal peyer's patches in calves. Veterinary Pathology 25, 131-137.
[0092] 15. Mortensen H., Nielsen S. S. & Berg P. (2004) Genetic Variation and Heritability of the Antibody Response to Mycobacterium avium subspecies paratuberculosis in Danish Holstein Cows. Journal of Dairy Science 87, 2108-2113.
[0093] 16. Ott S. L., Wells S. J. & Wagner B. A. (1999) Herd-level economic losses associated with Johne's disease on US dairy operations. Preventative Veterinary Medicine 40, 179-192.
[0094] 17. Purcell S., Neale B., Todd-Brown K., Thomas L., Ferreira M. A. R., Bender D., Maller J., Sklar P., de Bakker P. I. W., Daly M. J. & Sham P. C. (2007) PLINK: a toolset for whole-genome association and population-bases linkage analysis. American Journal of Human Genetics 81, 559-575.
[0095] 18. Reddacliff, L. A., Beh K., McGregor H. & Whittington R. J. (2005) A preliminary study of possible genetic influences on the susceptibility of sheep to Johne's disease. Australian Veterinary Journal 83, 435-441.
[0096] 19. Takizawa S., Uchide T., Adur J., Kozakai T., Kotake-Nara E., Quan J. & Saida K. (2005) Differential expression of endothelin-2 along the mouse intestinal tract. Journal of Molecular Endocrinology 35, 201-209.
[0097] 20. Taylor K. H., Taylor J. F., White S. N. & Womack J. E. (2006) Identification of genetic variation and putative regulatory regions in bovine CARD15. Mammalian Genome 17, 892-901.
[0098] 21. Waters W. R., Stabel J. R., Sacco R. E., Harp J. A., Pesch B. A. & Wannemuehler M. J. (1999) Antigen-specific B-cell unresponsiveness induced by chronic Mycobacterium avium subsp. paratuberculosis infection of cattle. Infection and Immunity 67, 1593-1598.
[0099] 22. Wellcome Trust Case Control Consortium (2007) Genome-wide association study of 14,000 cases of seven common diseases and 3,000 shared controls. Nature 447, 661-78.
[0100] 23. Whitlock R. H., Wells S. J., Sweeney R. W. & Van Tiem J. (2000) ELISA and fecal culture for paratuberculosis (Johne's disease): sensitivity and specificity of each method, Veterinary Microbiology 77, 387-398.
[0101] 24. Whitlock R. H., Rosenberger A. E., Sweeney R. W. & Spencer P. A. (1996) Distribution of M. paratuberculosis in tissues of cattle from herds infected with Johne's disease. In: Proceedings of the Fifth International Colloquium on Paratuberculosis (ed. By R. J. Chiodini, M. E. Hines & M. T. Collins), 29th September-4 Oct. 1996, International Association for Paratuberculosis, 44 Francis Street, Rehoboth, Mass., USA, 168-174.
[0102] 25. Whittington R. J. & Sergeant E. S. G. (2001) Progress towards understanding the spread, detection and control of Mycobacterium avium subsp. paratuberculosis in animal populations. Australian Veterinary Journal 79, 267-278.
[0103] 26. Wu C.-W., Livesey M., Schmoller S. K., Manning E. J. B., Steinberg H., Davis W. C., Hamilton M. J. & Talaat A. M. (2007) Invasion and persistence of Mycobacterium avium subsp. paratuberculosis during early stages of Johne's disease in calves. Infection and Immunity 75, 2110-2119.
[0104] 27. Devlin B. & Roeder K. (1999) Genomic control for association studies. Biometrics 55, 997-1004.

### Example 2

### Identification of Loci Associated with Tolerance to Johne's Disease in U.S. Holstein Cattle

[0105] Overview. Johne's disease is an incurable contagious bacterial illness caused by Mycobacterium avium subspecies paratuberculosis (Map). While the heritability of tolerance has been estimated at 0.09±0.036, the loci associated with tolerance have not yet been investigated. The low sensitivity of the current diagnostic techniques and the long incubation period (4 to 5 years) until the appearance of clinical signs are some of the major road blocks to controlling the disease (Chiodini & Merkal 1984; Collins et al. 2006).

[0106] The eradication of the disease has not been successfully obtained by traditional methods, and therefore new approaches are needed. One such approach is the genetic selection of animals that are tolerant to Johne's disease. Cattle have evolved defense mechanisms to fight pathogens, such as resistance and tolerance. Co-evolution between hosts and pathogens is believed to increase the biological diversity among animals and pathogens (Burdon and Muller 1987). Tolerance aims to reduce the harm caused by the parasite, whereas resistance prevents the infection of the pathogen. For the pathogen, tolerance results in a reduction of virulence, thereby increasing selection pressure for pathogens to exhibit higher growth rates. For the host, tolerance will tend to increase disease prevalence, while reducing the individual risk of death from the disease (Miller et al. 2006). Weiss and colleagues (2006) suggested that a state of tolerance may exist in the intestine of cows sub-clinically infected with Mycobacterium avium subsp. paratuberculosis after they analyzed the mucosal immune response of these cows. Zanella and colleagues (2008), found that tolerance to bovine paratuberculosis is heritable with estimates of 0.09±0.036. Gonda et al. (2007) were the first to report evidence of QTL (Quantitative Trait Loci) on chromosome 20 (BTA20) associated with susceptibility to Johne's disease. However the investigation or identification of the loci associated with tolerance to animal disease has not been undertaken.

[0107] The purpose of this EXAMPLE 2 was to identify loci associated with tolerance to Johne's disease in cows infected with Map using a genome-wide approach. Such identification could be used to develop a marker-assisted selection program to reduce the severity and the losses caused by Johne's disease in cattle.

[0108] Feces, ileum, two mesenteric lymph nodes, and tissue from the ileo-cecal valve were harvested and cultured for Map from 260 Holstein cows from four dairy herds. Ninety-four cows had a Map tissue colony-forming unit (CFU) value≧1; 42 of these had fecal CFU values≧1, and 8 animals had fecal CFU values exceeding their tissue CFU values. To compute a tolerance (T) index, the fecal CFU value+100 was divided by the tissue CFU value+100. Peak and average fecal and tissue values were used to determine Tₚₑₐₖ and T_{average} for each animal. Genotyping of these 94 animals was conducted with the Illumina bovineSNP50 bead array. After quality filtering and genotype pruning, 45,591 SNPs for 89 animals remained. The results did not show evidence for population substructure (genomic inflation factor, based on median Chi-sq statistic λ_{GC}=1.03). Whole genome association analysis was conducted using the R statistical environment and PLINK. Tolerance values were treated as a quantitative trait and compared with allele frequencies for each SNP. Strong evidence for association was identified with Tₚₑₐₖ and a locus on BTA15 (P=1.8×10⁻⁷, after Bonferroni correction P=0.0079) while moderate evidence for association (P=3.8×10⁻⁵) was identified on two adjacent SNPs on BTA 6. The same SNP on BTA 15 showed moderate evidence for association (P=3×10⁻⁶) with T_{average}. Four additional SNPs also showed moderate evidence for association on BTA 17 (P=2.68×10⁻⁵), BTA 2 (P=3.8×10⁻⁵), BTA 1 (P=4.5×10⁻⁵) and BTA 16 (4.5×10⁻⁵). This is the first study to evaluate and identify genetic tolerance loci with disease in cattle.

### Materials & Methods:

[0109] Selection of Animals and Data Collection. Fecal samples for two hundred fifty-four Holstein cows from four dairy herds located in New York (Herd A), Pennsylvania (Herd B and Herd C), and Vermont (Herd D) were cultured every 3 to 6 months between January 1999 and November 2007 or until the animals were culled. The disease status of the animals was determined by the number of colony forming units of Map from culture of tissue samples of the ileum, ileo-cecal valve, and two adjacent ileo-cecal lymph nodes harvested at slaughter, as described by Whitlock et al. (1996 and 2000).

[0110] Tolerance was estimated in animals that in which the tissue was infected with Map. The disease status of the animals was determined by the results of the tissue culture, because of the higher sensitivity of tissue culture compared to fecal culture or ELISA. Animals were considered to be Johne's positive if they had one or more colony-forming units per gram of tissue (CFUₜ/g>1) in any of the four tissues examined. Ninety-four (36%) of the animals tested had tissue infected with Map (Table 4). The mean age of animals was 59 months, with a range of 22.87 to 135 months.

TABLE 4
Distribution of infected animals by herd.

| Herd | Total |
|---|---|
| Herd A | 30 |
| Herd B | 9 |
| Herd C | 16 |
| Herd W | 39 |
| Total | 94 |

[0111] The tolerance index (T) was calculated using the peak (T_{Peak}) and average (T_{Average}) CFUs for feces and tissue taken at slaughter. The tolerance index was defined as the fecal CFUs (CFU_{f})+100 divided by the tissue CFUs (CFUₜ)+100 (FIG. 7).

[0112] DNA Preparation and Genotyping. DNA was extracted from 15-40 mg of tissue from each animal using the Puregene DNA extraction kit per manufacturer's instructions (Gentra, Minneapolis, Minn.). DNA samples were quantified using NanoDrop spectrophotometry, and DNA purity was estimated using the 260/280 ratio. Samples with 260/280 ratios below 1.8 and higher than 2.0 were excluded because of possible protein and (or) RNA contamination that could compromise the quality of the genotype. Five micrograms of DNA were diluted to a final concentration of 50 ng/μl and genotyped with the Illumina BovineSNP50 BeadChip as described (Matukumalli et al., 2008). The Illumina BovineSNP50 beadchip assay contains 55,074 SNPs with a mean spacing of one SNP every 35 kb across the bovine genome.

[0113] Quality Assurance. All samples were brought into a single BeadStudio file, and genotypes were identified using a custom cluster file that was based on >2,000 samples from multiple cattle breeds. Samples were first evaluated for quality control. Two samples were removed from the analysis because of a no call rate greater than 10%. These samples were removed because samples with a call-rate less than 90% may be due to degraded DNA. Multidimensional scaling analysis (MDS) plotted the genome-wide identity-by-state (IBS) of the SNPs to identify animals with significant genetic variation. Animals (n=3) with different genetic backgrounds were removed from the analysis. After exclusion of the outlier from the analyses, MDS plot showed all the animals with similar genetic ancestry (FIG. 8). After the removal of animals for quality control, eighty-nine animals (n=89) remained for the analyses with a call rate of 98.9%. In addition to evaluation of the samples for quality, the SNPs were also scrutinized. Monomorphic SNPs (6,356), SNPs with minor allele frequencies less than 1% (8,185), and SNPs with greater than a 10% no call-rate (1,503) were removed from the analysis. After frequency and genotyping pruning, 45,591 SNPs were left for the association analysis.

[0114] Association Analysis. The whole genome association study was conducted to find SNP's associated with the spectrum of tolerance values in animals with tissue infected with Map (FIGS. 9 and 10). For this approach tolerance was treated as a quantitative trait. T_{Peak} values ranged from T_{Peak}=0.27 to 1.07 and T_{Average} value ranged from T_{Average}=0.35 to 1.64. The whole genome association analysis was conducted using the R statistical environment and PLINK (Purcell et al 2007, Version 1.04). The likelihood ratio test and the Wald statistical test were used within PLINK. Significance for association tests were based on the recommendation of the Welcome Trust Case Control Consortium (2007) where unadjusted P values less than 5×10⁻⁷ were considered to provide strong evidence of association and unadjusted P values between 5×10⁻⁵ and 5×10⁻⁷ were considered to provide moderate evidence for association. Associations with strong evidence as defined by the Welcome Trust Case Control Consortium coincide with the associations identified after Bonferroni correction for multiple testing.

### Results:

[0115] Quantitative analysis for association of loci with tolerance. Each SNP was analyzed for the presence of an association with peak and average tolerance. Multidimensional scaling plot, QQ-plot, and the genomic inflation factor were evaluated to identify population stratification using the quantitative measure of tolerance of T_{Peak}. No evidence for population stratification was observed (FIG. 11A). Strong evidence for association for T_{Peak} was found with SNP BTB-00584953, located on BTA 15, at position 21,254,062 by using the basic allelic model (unadjusted P=1.8×10⁻⁷; P=0.0079 after Bonferroni correction). A second SNP on BTA 15, located 2.8 Mb from BTB-00584953, was associated (P=4.7×10⁻⁵) with T_{Peak}. two other SNPs, located 79 Kb apart from each other on BTA 6, were found to have a moderate significance using the basic allelic model (unadjusted P=3.8×10⁻⁵). Similar to the quantitative measure of tolerance T_{Peak}, T_{Average} did not show evidence for population stratification after analysis with the multidimensional scaling plot, QQ plots or the genomic inflation factor (FIG. 11B). Using the basic alleleic model, moderate evidence for association (P=3.035×10⁻⁶) for with T_{Average} was shown with the same SNP on BTA 15 as was identified with T_{Peak}. Additional SNPs located on BTA 17 (unadjusted P=2.68×10⁻⁵), BTA 2 (unadjusted P=3.8×10⁻⁵), BTA 1 (unadjusted P=4.5×10⁻⁵) and BTA 16 (unadjusted P=4.5×10⁻⁵) also showed moderate evidence for association with T_{Average}.

### REFERENCES CITED FOR THIS EXAMPLE 2, AND INCORPORATED HEREIN FOR THEIR RESPECTIVE TEACHINGS

[0116] 1. APHIS Johne's Disease on U.S. Diaries 1991-2007 Animal and Plant Health Inspection Service (APHIS)., 2008, p 3.
[0117] 2. Abubakar, I.; Myhill, D.; Aliyu, S. H. & Hunter, P. R. Detection of Mycobacterium avium subspecies paratuberculosis from patients with Crohn's disease using nucleic acid-based techniques: a systematic review and meta-analysis. Inflamm Bowel Dis, 2008, 14, 401-410
[0118] 3. Alaniz, R. C.; Thomas, S. A.; Perez-Melgosa, M.; Mueller, K.; Fan, A. G.; Palmiter, R. D. & Wilson, C. B. Dopamine beta-hydroxylase deficiency impairs cellular immunity. Proc Natl Acad Sci, 1999, 96, 2274-2278
[0119] 4. Banerjee, S. & Bond, J. S. Prointerleukin-18 is activated by meprin beta in vitro and in vivo in intestinal inflammation. J Biol Chem., 2008
[0120] 5. Burdon J J, M. W Measuring the cost of resistance to Puccinia coronata Cda in Avena fatua L. Journal of Applied Ecology, 1987, 24, 191-200.
[0121] 6. Chiodini, R. J., V. K. H. & Merkal, R. Ruminant paratuberculosis (Johne's disease): the current status and future prospects. Ruminant paratuberculosis (Johne's disease): the current status and future prospects. Cornell Vet., 1984, 74, 218-62.
[0122] 7. Churchill G A, Doerge R W. Empirical threshold values for quantitative trait mapping. Genetics. 1994; 138:963-71.
[0123] 8. Collins, M. T.; Gardner, I. A.; Garry, F. B.; Roussel, A. J. & Wells, S. J. Consensus recommendations on diagnostic testing for the detection of paratuberculosis in cattle in the United States. J Am Vet Med Assoc, 2006, 229, 1912-1919
[0124] 9. Gonda, M. G.; Chang, Y. M.; Shook, G. E.; Collins, M. T. & Kirkpatrick, B. W. Effect of Mycobacterium paratuberculosis infection on production, reproduction, and health traits in US Holsteins. Prev Vet Med, 2007, 80, 103-119
[0125] 10. Gonda, M. G.; Kirkpatrick, B. W.; Shook, G. E. & Collins, M. T. Identification of a QTL on BTA20 affecting susceptibility to Mycobacterium avium ssp. paratuberculosis infection in US Holsteins. Anim Genet, Dairy Science, 2007, 38, 389-396
[0126] 11. Harris, N. B. & Barletta, R. G. Mycobacterium avium subsp. paratuberculosis in Veterinary Medicine. Clin Microbiol Rev. 2001, 14, 489-512
[0127] 12. Imtiaz F, Savilahti E, Sarnesto A, Trabzuni D, A l-Kahtani K, Kagevi I, Rashed M S, Meyer B F, JärveläI. The T/G 13915 variant upstream of the lactase gene (LCT) is the founder allele of lactase persistence in an urban Saudi population. J Med Genet, 2007 oct, 44(10):e89.
[0128] 13. Li, J.; Zhou, Y. & Elston, R. C. Haplotype-based quantitative trait mapping using a clustering algorithm. BMC Bioinformatics, 2006, 7, 258
[0129] 14. Li, J.; Yu, L.; Shen, Y.; Zhou, L.; Wang, Y. & Zhang, J Inhibition of CXCR4 activity with AMD3100 decreases invasion of human colorectal cancer cells in vitro. World J Gastroenterol, 2008, 14, 2308-2313
[0130] 15. Matukumalli, L. K.; Lawley, C. T.; Schnabel, R. D.; Taylor, J. F.; Allan, M.; Heaton, M. P.; O'Connell, J. R.; Sonstegard, T. S; Smith, T. P. L.; Moore, S. S. and Van Tassell, C. P. Development and characterization of a high density SNP genotyping assay for cattle. 2008. (Submitted)
[0131] 16. Miller, M. R.; White, A. & Boots, M. The evolution of parasites in response to tolerance in their hosts: the good, the bad, and apparent commensalism. Evolution, 2006, 60, 945-956.
[0132] 17. Nordlund, K. V.; Goodger, W. J.; Pelletier, J. & Collins, M. T. Associations between subclinical paratuberculosis and milk production, milk components, and somatic cell counts in dairy herds. J Am Vet Med Assoc, Department of Medical Sciences, 1996, 208, 1872-1876
[0133] 18. Ott, S. L.; Wells, S. J. & Wagner, B. A. Herd-level economic losses associated with Johne's disease on US dairy operations. Prev Vet Med, 1999, 40, 179-192
[0134] 19. Purcell S, Neale B, Todd-Brown K, Thomas L, Ferreira MAR, Bender D, Maller J, Sklar P, de Bakker P I W, Daly M J & Sham P C (2007) PLINK: a toolset for whole-genome association and population-bases linkage analysis. American Journal of Human Genetics, 81.
[0135] 20. Smyth, R. H., C. G. & Smyth, R. H., C. G. Some observations on Johne's disease with a further note on the examination of fecal samples. Vet Ret, 1950, 62, 429-450
[0136] 21. Sockett, D. C.; Can, D. J. & Collins, M. T. Evaluation of conventional and radiometric fecal culture and a commercial DNA probe for diagnosis of Mycobacterium paratuberculosis infections in cattle. Can J Vet Res. 1992, 56, 148-153
[0137] 22. Thony, B.; Blau, N.: Mutations in the GTP cyclohydrolase I and 6-pyruvoyl-tetrahydropterin synthase genes. Hum. Mutat. 1997, 10: 11-20.
[0138] 23. Xu, J.; Zhang, S.; You, C.; Huang, S.; Cai, B. & Wang, X. Expression of human MCM6 and DNA Topo II alpha in craniopharyngiomas and its correlation with recurrence of the tumor. J Neurooncol, 2007, 83, 183-189.
[0139] 24. Weiss, D. J.; Evanson, O. A. & Souza, C. D. Mucosal immune response in cattle with subclinical Johne's disease. Vet Pathol, Department of Veterinary, 2006, 43, 127-135 Wellcome Trust Case Control Consortium. Genome-wide association study of 14,000 cases of seven common diseases and 3,000 shared controls. Nature 2007, 447:661-78
[0140] 25. Whitlock, R. H.; Wells, S. J.; Sweeney, R. W. & Tiem, J. V. ELISA and fecal culture for paratuberculosis (Johne's disease): sensitivity and specificity of each method. Vet Microbiol, 2000, 77, 387-398
[0141] 26. Whitlock, R. H., Rosenberger, A. E., Sweeney, R. W., Spencer, P. A., Distribution of M. paratuberculosis in tissues of cattle from herds infected with Johne's disease. Proceedings of the Fifth International Colloquium on Paratuberculosis, 1996, 4:168-174.
[0142] 27. Zanella, R., Settles, M., Fyock, T., Whitlock, R., Schukken, Y., Van Kessel, J., Karns, J., Hoving, E., Smith, J., Van Tassel, C., Gaskins, C. and Neibergs, H. Heritability of Genetic Tolerance to Johne's Disease Poster ASAS, Indianapolis., 2008.

### Example 3

### Identification of Map Infection Linkage Disequilibrium Region, and Loci Associated with Tolerance to Johne's Disease in U.S. Holstein Cattle

[0143] Overview. Applicants have herein identified loci that are associated with tissue infection of cattle with Map (see also Applicants' Settles et al, doi:10.111/j.1365-2052.2009.01896.x publication; incorporated herein in its entirety for its teaches on these loci, mutants thereof, and diagnostic uses thereof).

### Materials and Methods:

[0144] The population of animals used in the infection study was 245 Holstein cows from dairies in New York, Pennsylvania and Vermont that were followed to culling. Culling may have occurred for any reason, including having a Map positive diagnostic test. Fecal, ileum, ileo-cecal valve and two ileo-cecal lymph nodes were assessed for the presence of Map in each culled cow. An animal was considered tissue infected if a sample contained at least one colony-forming unit per gram of tissue (cfu/g). Fecal samples were also considered positive for Map if one or more cfu/g were detected. Each animal was genotyped with the Illumina BovineSNP50 BeadChip and after quality assurance filtering, 218 animals and 45,683 SNPs remained.

[0145] A case-control genome wide association study was conducted to test four different classifications of Map infection status (Cases) when compared to a Map negative control group (Control): presence of Map in the tissue, presence of Map in feces, presence of Map in both tissue and feces and presence of Map in tissue but not feces

### Results:

[0146] Regions on chromosomes 1, 5, 7, 8, 16, 21 and 23 were identified that showed moderate significance (P<5×10⁻⁵). A region on chromosome 3 (FIG. 12) was identified with a high level of association to the presence of Map in tissue (P=3×10⁻⁷, genome-wide Bonferonni correction for multiple testing P<0.05).

[0147] A 235 kb region (SEQ ID NO:45) associated with Map tissue infection on chromosome 3 was defined by 3 genetic markers (single nucleotide polymorphisms or SNPs) where the evidence of association fell away in both directions (FIG. 13).

[0148] FIG. 2 shows locations of single nucleotide polymorphisms (SNPs) (in base pairs) on bovine chromosome 3. The SNP at 111,682,510 (SS86341066) was the most strongly associated with tissue infection (P=3×10⁻⁷).

[0149] In particular preferred aspects, the 235 kb region (SEQ ID NO:45), or a 255,586 by region (SEQ ID NO:1) of bovine chromosome 3, referred to herein at the inventive “Map infection linkage disequilibrium region” is disclosed to be associated with Map tissue infection (P=7×10⁻⁸), and is further characterized as including three functionally relevant genes: HIVEP3 (Human immunodeficiency virus type I enhancer-binding protein 3) (SEQ ID NO:2); EDN2 (Endothelin 2) (SEQ ID NO:3); and LOC521287 (Bos taurus similar to forkhead box O6) (SEQ ID NO:4), and the respective coding transcripts (SEQ ID NOS:5, 6 and 7, respectively), and polypeptides (SEQ ID NOS:8, 9 and 10, respectively).

[0150] Endothelin 2 (EDN2) (SEQ ID NO:3), one of only three genes in this region, resides within 37 kb of the most highly associated SNP on chromosome 3. This gene is known to have a physiological function in Crohn's disease in humans, is a potent vasoconstrictor and is a positive regulator of chemotaxis in macrophages in response to pathogens (refs). EDN2 binds to toll-like receptors inside the cell and may serve as an intracellular transporter. EDN2 (nucleotide sequence reference AB100737) has 3 known mutations in cattle, a cDNA of 1247 by and a genomic sequence of 5924 by (Benson et al. 2004). The EDN2 gene is conserved in human, chimpanzee, dog, mouse, rat, and chicken.

[0151] The second gene in this region is HIVEP3 (Human immunodeficiency virus type I enhancer-binding protein 3) (SEQ ID NO:2). HIVEP3 is a large gene that covers 54,554 nucleotides (111,560,078-111,614,632 bp) and ends near a SNP (111,623,091 by on chromosome 3) that is associated (P=0.0008) with Map tissue infection. This gene produces proteins that bind specific DNA sequences, including the kappa-B motif (GGGACTTTCC), in the promoters and enhancer regions of several genes involved in immunity, inflammation, and growth. Expression of this gene correlates with the presence of viral antigens, mitogens, cytokines and viruses, including human immunodeficiency virus (HIV).

[0152] The LOC521287 (Bos taurus similar to forkhead box O6) (SEQ ID NO:4) gene is conserved in human, mouse, rat, and zebrafish.

[0153] The sequence information for these three genes is shown in Table 5. Additionally, FIG. 19 shows a schematic of the region from chromosome 3 of Bos taurus from position 11432282-111943455 corresponding to NC 007301.3 (based on Btau 4.0), which includes the HIVEP3 (Human immunodeficiency virus type I enhancer-binding protein 3) (SEQ ID NO:2); EDN2 (Endothelin 2) (SEQ ID NO:3); and LOC521287 (Bos taurus similar to forkhead box O6) (SEQ ID NO:4) genes.

TABLE 5
Sequence summary table showing position of the inventive linkage disequilibrium
region, along with the HIVEP3, EDN2 and similar to forkhead box O6
subregions thereof, and including the respective GenBank accession
and version numbers and corresponding SEQ ID NOS: 1-10.

| | Gene sequence: | mRNA sequence: | |
|---|---|---|---|
| | Accession number; | Accession number; | |
| | Version number; | Version number; | Protein sequence: |
| Region or Gene | and chromosome 3 | and chromosome 3 | Accession number and |
| name | position | position | Version number, |
| Linkage | NC_007301.3; | See below | See below |
| disequilibrium | GI:194719407; | | |
| region | 111,560,078 to | | |
| | 111,815,664 | | |
| | (255,586 bp) | | |
| | (SEQ ID NO: 1). | | |
| Or | NC_007301.3; | | |
| Linkage | GI:194719407; | | |
| disequilibrium | 111,586,713 to | | |
| region | 111,821,916 | | |
| | (235,204 bp) | | |
| | (SEQ ID NO: 45) | | |
| HIVEP3 | NC_007301.3; | XM_001787465.1; | XP_001787517.1; |
| Bos taurus similar | GI:194719407; | GI:194665884; | GI:194665885; |
| to human | 111,560,078 to | (mRNA processed | (2,775 amino acids) |
| immunodeficiency | 111,614,644 | 8,328 nt) | (SEQ ID NO: 8) |
| virus type I | (54,567 bp) | (SEQ ID NO: 5) | |
| enhancer binding | (SEQ ID NO: 2) | | |
| protein 3 | | | |
| (LOC509866) | | | |
| EDN2 | NC_007301.3; | NM_175714.2; | NP_783645.1; |
| (Bos taurus | GI:194719407; | GI:31342231 | GI:28372485 |
| Endothelin 2) | 111,645,420 to | (1,249 bp | (177 amino acid |
| | 111,651,344 | processed mRNA) | protein) |
| | (5,925 bp) | (SEQ ID NO: 6) | (SEQ ID NO: 9) |
| | (SEQ ID NO: 3) | | |
| | | See also | See also |
| | | AB100737.1 | BAC55924.1 |
| | | GI:27923033 | GI:27923034 |
| | | (1,247 bp | (177 amino acid |
| | | processed mRNA) | protein) |
| Bos taurus similar | NC_007301.3; | XM_599547.4; | XP_599547.4; |
| to forkhead box | GI:194719407; | GI:194665886 | GI:194665887 |
| O6 | 111,794,197 to | (mRNA processed | (535 amino acids) |
| (LOC521287) | 111,815,664 | 1,608 nt) | (SEQ ID NO: 10) |
| | (21,468 bp) | (SEQ ID NO: 7) | |
| | (SEQ ID NO: 4) | | |

[0154] Our genome-wide association study has provided us with strong evidence of association with Map tissue infection that comprised a 235 kb region (SEQ ID NO:45) (and a 255,586 by region (SEQ ID NO:1)) on bovine chromosome 3. According to particular aspects, the EDN2, HIVEP3 and LOC521287 genes have, alone and/or in combination, functions that affect tissue infection of Map in cattle.

[0155] To confirm the association study and further characterize the association of Map tissue infection on chromosome 3, 42 additional SNPs were chosen from the NCBI SNP database (http://www.ncbi.nlm.nih.gov/projects/SNP/) to genotype the same animals that were used initially to identify the association of Map tissue infection on chromosome 3. Eighteen of the chosen 42 markers had minor allele frequencies less than 1% in the study animals and were removed from the analysis. Of the SNPs that remained, 17 were in region A in FIG. 2 (mean spacing between SNPs of 1682 bp), 2 in region B (mean spacing of 13,246 bp), 3 in region C (mean spacing of 10,975 bp) and 1 in region D (mean spacing of 69,703 bp). In relation to the genes in this region, exons 4 and 5 of HIVEP3 are located in region A, exons 1 through 4 of EDN2 are located in region B and exon 5 is located in region C. The LOC521287 (Bos taurus similar to forkhead box O6) (SEQ ID NO:4) gene is located to the right in region D. Unfortunately, only two SNPs 3′ to SS86341066 (the SNP with the most evidence for an association with tissue infection) remained after removal of poorly performing or uninformative SNPs. This left a distance of 10 kb and 138 between the last two 3′ SNPs in this region and SS86341066. Twenty-four markers (including a SNP in exon 4 of HIVEP3 and in two non-coding regions of EDN2) were analyzed for an association with tissue infection using chi square analysis.

[0156] A large region near SS86341066 was found to be associated with Map tissue infection after analysis with the 24 additional SNPs. Thirteen SNPs were associated (P<0.05) with Map tissue infection over the 235 kb region. In a region of 83 kb (111,610,137 to 111,693,185 bp) (SEQ ID NO:47) encompassing SNPs for HIVEP3, EDN2 and SS86341066, ten of ten SNPs were associated with Map tissue infection (FIG. 14) including three SNPs with particularly strong evidence for association (P<2×10⁻⁵).

[0157] FIG. 3 shows an association analysis of an 83 kb region of chromosome 3. Location of SNPs (in by with respect to NC_{—}007301.3) are listed on the x axis and the −log 10 (p value) of the association of each SNP with Map tissue infection is listed on the y axis. A −log 10 value of 1.2 represents P=0.05. SNPs with the greatest evidence for association with Map tissue infection include the SNP at 111,623,092 (P=9.4×10⁻⁷), the adjacent 3′ SNP 111,693,185 (P=1.1×10⁻⁵) and the SNP located between HIVEP3 and EDN2 at 111,682,510 by (P=7.5×10⁻⁸). SNPs that are marked with “**” indicate SNPs that were first analyzed with the use of the Illumina bovine SNP50 BeadChip™ and were also included in the fine mapping of additional SNPs in this region.

[0158] The association of these SNPs with Map tissue infection is due to linkage disequilibrium. Linkage disequilibrium (LD) refers to correlations among neighboring alleles, reflecting haplotypes descended from single, ancestral chromosomes. Groups of adjacent alleles that have been inherited together can be used to identify genes that cause disease. In the cattle genome, genome-wide LD extends up to an average of 100 kb. This means that within a 100 kb region, it is expected that most of the nucleotides will be inherited together as a block with little recombination or deterioration of LD between the nucleotides over individual generations. Over time, however, LD will slowly deteriorate because of the process of recombination in meiosis. In this process, SNPs that were due to mutations that occurred a long time ago are more likely to have fallen out of LD than SNPs in the same region that are fairly new.

[0159] The analysis of SNPs associated with a disease in cattle within a region smaller than 100 kb must considered carefully. Individual SNPs may not provide strong evidence for an association with the disease because that particular SNP may be much older than a nearby “new” SNP that remains in LD with the disease. Because the age of the SNPs are unknown, evaluating the trends of LD within a genomic region of 100 kb or less is particularly helpful. Therefore, it is most important to evaluate the entire region of interest that is associated with the disease rather than solely targeting the DNA immediately adjacent to the SNP with the most evidence for an association. The fine mapping results shown here provide extremely strong evidence of a region and locus that is responsible for differences in Map tissue infection in Holstein cows because an entire block of SNPs are associated with the disease.

[0160] Haplotypes were further analyzed for the 83 kb region where the evidence for an association to Map tissue infection was strongest. A haplotype represents the linear arrangement of alleles of the SNPs on one of the two chromosomes in a pair of chromosomes that a cow inherits from her dam or sire. In this haplotype analysis, the complement of alleles on chromosome 3 inherited from the mother (maternal haplotype), and the complement of alleles on chromosome 3 inherited from the father (paternal haplotype) are evaluated separately. The frequencies of the maternal and paternal haplotypes of the Map infected cows are then compared to the haplotype frequencies of the cows that are uninfected.

[0161] Alleles from 11 SNPs comprised a single haplotype in the 86 kb region (SEQ ID NO:48) (FIG. 15). Twenty-five different combination of alleles for the 11 SNPs were observed and distinct differences were detected between the haplotype frequencies of Map tissue infected animals and uninfected animals (P=2.2×10⁻⁷). The differences in these frequencies demonstrated that certain SNPs in this region were inherited together as a single ancestral block on chromosome 3. This ancestral block also segregated with Map tissue infection. This block represents five SNPs and pinpoints, with very high probability, an underlying sequence that harbors a mutation(s) responsible for resistance to Map.

[0162] Alleles of five SNPs (FIG. 15) were different between every Map tissue infected and uninfected cow. Four of these SNPs are adjacent to or span exons in HIVEP3. This data provides strong evidence that this region harbors a mutation that is associated with resistance to Map tissue infection, located in or near exon four or five of HIVEP3.

[0163] The data disclosed herein, provide strong evidence of mutations in a 235 kb region (SEQ ID NO:45) (and a 255,586 by region (SEQ ID NO:1) on bovine chromosome 3) that are associated with Map tissue infection, a critical step in the pathogenic process leading to Johne's disease. The 235 kb region was further characterized by increasing the density of SNPs in this area to elucidate a more refined profile of the genome associated with Map tissue infection. This profile confirmed Applicants' initial association results, and identified a haplotype comprising 76 kb (SEQ ID NO:46), from about 111,606,511 to 111,682,511, or from about 111,606,781 to 111,682,511 (comprising 5 SNPs) as particularly preferred region(s) harboring one or more mutation(s) responsible for the resistance of cattle to Map tissue infection. The identification of the linkage disequilibrium regions and mutation(s) disclosed herein provides for compositions and methods for susceptibility, resistance or tolerance to infection by Mycobacteria and Paratuberculosis, and hence to Johne's disease through Map tissue infection.

Nucleic acid sequences encoding mutant nucleic acid and proteins corresponding to HIVEP3 (Human immunodeficiency virus type I enhancer-binding protein 3) (SEQ ID NO:2); EDN2 (Endothelin 2) (SEQ ID NO:3); and LOC521287 (Bos taurus similar to forkhead box O6) (SEQ ID NO:4), and the respective coding transcripts (SEQ ID NOS:5, 6 and 7, respectively), and polypeptides (SEQ ID NOS:8, 9 and 10, respectively) are provide

[0164] Nucleic acid sequences comprising one or more nucleotide deletions, insertions or substitutions relative to the wild type nucleic acid sequences are another embodiment of the invention, as are fragments of such mutant nucleic acid molecules. Such mutant nucleic acid sequences (e.g., mutants of genes: HIVEP3 (Human immunodeficiency virus type I enhancer-binding protein 3) (SEQ ID NO:2); EDN2 (Endothelin 2) (SEQ ID NO:3); and LOC521287 (Bos taurus similar to forkhead box O6) (SEQ ID NO:4), and the respective coding transcripts (SEQ ID NOS:5, 6 and 7, respectively), and polypeptides (SEQ ID NOS:8, 9 and 10, respectively) can be generated and/or identified using various known methods, as described further below. Again, such nucleic acid molecules are provided both in endogenous form and in isolated form. In one embodiment, the mutation(s) result in one or more changes (deletions, insertions and/or substitutions) in the amino acid sequence of the encoded protein (i.e. it is not a “silent mutation”). In another embodiment, the mutation(s) in the nucleic acid sequence result in a significantly modulated (up or down), reduced or completely abolished biological activity of the encoded protein relative to the wild type protein.

[0165] The nucleic acid molecules may, thus, comprise one or more mutations, such as:

[0166] (a) a “missense mutation”, which is a change in the nucleic acid sequence that results in the substitution of an amino acid for another amino acid;

[0167] (b) a “nonsense mutation” or “STOP codon mutation”, which is a change in the nucleic acid sequence that results in the introduction of a premature STOP codon and thus the termination of translation (resulting in a truncated protein); plant genes contain the translation stop codons “TGA” (UGA in RNA), “TAA” (UAA in RNA) and “TAG” (UAG in RNA); thus any nucleotide substitution, insertion, deletion which results in one of these codons to be in the mature mRNA being translated (in the reading frame) will terminate translation.

[0168] (c) an “insertion mutation” of one or more amino acids, due to one or more codons having been added in the coding sequence of the nucleic acid;

[0169] (d) a “deletion mutation” of one or more amino acids, due to one or more codons having been deleted in the coding sequence of the nucleic acid;

[0170] (e) a “frameshift mutation”, resulting in the nucleic acid sequence being translated in a different frame downstream of the mutation. A frameshift mutation can have various causes, such as the insertion, deletion or duplication of one or more nucleotides.

[0171] It is understood that mutations in certain parts of the protein are more likely to result in a reduced function of the mutant HIVEP3, EDN2, or LOC521287 proteins, such as mutations leading to truncated proteins, whereby significant portions of the functional domains are lacking.

[0172] Thus in one embodiment, nucleic acid sequences comprising one or more of any of the types of mutations described above are provided. In another embodiment, sequences comprising one or more stop codon (nonsense) mutations, one or more missense mutations and/or one or more frameshift mutations are provided. Any of the above mutant nucleic acid sequences are provided per se (e.g., in isolated form).

### Polypeptide and Nucleic Acid Variants:

[0173] Variants of HIVEP3, EDN2, or LOC521287 proteins have utility for aspects of the present invention. Variants can be naturally or non-naturally occurring. Naturally occurring variants (e.g., polymorphisms) are found in various species and comprise amino acid sequences which are substantially identical to the amino acid sequence shown in SEQ ID NOS:8, 9 and 10. Species homologs of the protein can be obtained using subgenomic polynucleotides of the invention, as described below, to make suitable probes or primers for screening cDNA expression libraries from other species, such as human, mice, monkeys, yeast, or bacteria, identifying cDNAs which encode homologs of the protein, and expressing the cDNAs as is known in the art. Orthologs are provided for herein.

[0174] Non-naturally occurring variants which retain (or lack) substantially the same biological activities as naturally occurring protein variants are also included here. Preferably, naturally or non-naturally occurring variants have amino acid sequences which are at least 85%, 90%, 95%, 96%, 97%, 98%, 99% or greater than 99% identical to the amino acid sequence shown in SEQ ID NOS:3 or 5. More preferably, the molecules are at least 98%, 99% or greater than 99% identical. Percent identity is determined using any method known in the art. A non-limiting example is the Smith-Waterman homology search algorithm using an affine gap search with a gap open penalty of 12 and a gap extension penalty of 1. The Smith-Waterman homology search algorithm is taught in Smith and Waterman, Adv. Appl. Math. 2:482-489, 1981.

[0175] As used herein, “amino acid residue” refers to an amino acid formed upon chemical digestion (hydrolysis) of a polypeptide at its peptide linkages. The amino acid residues described herein are generally in the “L” isomeric form. Residues in the “D” isomeric form can be substituted for any L-amino acid residue, as long as the desired functional property is retained by the polypeptide. NH2 refers to the free amino group present at the amino terminus of a polypeptide. COOH refers to the free carboxy group present at the carboxyl terminus of a polypeptide. In keeping with standard polypeptide nomenclature described in J. Biol. Chem., 243:3552-59 (1969) and adopted at 37 C.F.R. §§.1.821-1.822, abbreviations for amino acid residues are shown in Table 6:

TABLE 6
Table of Correspondence

SYMBOL

| 1-Letter | 3-Letter | AMINO ACID |
|---|---|---|
| Y | Tyr | Tyrosine |
| G | Gly | Glycine |
| F | Phe | Phenylalanine |
| M | Met | Methionine |
| A | Ala | Alanine |
| S | Ser | Serine |
| I | Ile | Isoleucine |
| L | Leu | Leucine |
| T | Thr | Threonine |
| V | Val | Valine |
| P | Pro | Praline |
| K | Lys | Lysine |
| H | His | Histidine |
| Q | Gln | Glutamine |
| E | Glu | glutamic acid |
| Z | Glx | Glu and/or Gln |
| W | Trp | Tryptophan |
| R | Arg | Arginine |
| D | Asp | aspartic acid |
| N | Asn | Asparagines |
| B | Asx | Asn and/or Asp |
| C | Cys | Cysteine |
| X | Xaa | Unknown or other |

[0176] It should be noted that all amino acid residue sequences represented herein by a formula have a left to right orientation in the conventional direction of amino-terminus to carboxyl-terminus. In addition, the phrase “amino acid residue” is defined to include the amino acids listed in the Table of Correspondence and modified and unusual amino acids, such as those referred to in 37 C.F.R. §§1.821-1.822, and incorporated herein by reference. Furthermore, it should be noted that a dash at the beginning or end of an amino acid residue sequence indicates a peptide bond to a further sequence of one or more amino acid residues or to an amino-terminal group such as NH₂ or to a carboxyl-terminal group such as COOH.

[0177] Guidance in determining which amino acid residues can be substituted, inserted, or deleted without abolishing biological or immunological activity can be found using computer programs well known in the art, such as DNASTAR software. Preferably, amino acid changes in the protein variants disclosed herein are conservative amino acid changes, i.e., substitutions of similarly charged or uncharged amino acids. A conservative amino acid change involves substitution of one of a family of amino acids which are related in their side chains. Naturally occurring amino acids are generally divided into four families: acidic (aspartate, glutamate), basic (lysine, arginine, histidine), non-polar (alanine, valine, leucine, isoleucine, proline, phenylalanine, methionine, tryptophan), and uncharged polar (glycine, asparagine, glutamine, cystine, serine, threonine, tyrosine) amino acids. Phenylalanine, tryptophan, and tyrosine are sometimes classified jointly as aromatic amino acids. Preferably, amino acid changes in the HIVEP3, EDN2, or LOC521287 proteins polypeptide variants are conservative amino acid changes, i.e., substitutions of similarly charged or uncharged amino acids.

[0178] It is reasonable to expect that an isolated replacement of a leucine with an isoleucine or valine, an aspartate with a glutamate, a threonine with a serine, or a similar replacement of an amino acid with a structurally related amino acid will not have a major effect on the biological properties of the resulting variant. Properties and functions of HIVEP3, EDN2, or LOC521287 protein or polypeptide variants are of the same type as a protein comprising the amino acid sequence encoded by the complements of the respective nucleotide sequence shown above, although the properties and functions of variants can differ in degree.

[0179] Variants of the HIVEP3, EDN2, or LOC521287 proteins disclosed herein include glycosylated forms, aggregative conjugates with other molecules, and covalent conjugates with unrelated chemical moieties (e.g., pegylated molecules). Covalent variants can be prepared by linking functionalities to groups which are found in the amino acid chain or at the N- or C-terminal residue, as is known in the art. Variants also include allelic variants, species variants, and muteins. Truncations or deletions of regions which do or do not affect functional activity of the proteins are also variants. Covalent variants can be prepared by linking functionalities to groups which are found in the amino acid chain or at the N- or C-terminal residue, as is known in the art.

[0180] A subset of mutants, called muteins, is a group of polypeptides in which neutral amino acids, such as serines, are substituted for cysteine residues which do not participate in disulfide bonds. These mutants may be stable over a broader temperature range than native secreted proteins (see, e.g., Mark et al., U.S. Pat. No. 4,959,314).

[0181] It will be recognized in the art that some amino acid sequences of the HIVEP3, EDN2, or LOC521287 proteins of the invention can be varied without significant effect on the structure or function of the protein. If such differences in sequence are contemplated, it should be remembered that there are critical areas on the protein which determine activity. In general, it is possible to replace residues that form the tertiary structure, provided that residues performing a similar function are used. In other instances, the type of residue may be completely unimportant if the alteration occurs at a non-critical region of the protein. The replacement of amino acids can also change the selectivity of ligand binding to cell surface receptors (Ostade et al., Nature 361:266-268, 1993). Thus, the HIVEP3, EDN2, or LOC521287 proteins of the present invention may include one or more amino acid substitutions, deletions or additions, either from natural mutations or human manipulation.

[0182] Amino acids in the HIVEP3, EDN2, or LOC521287 proteins of the present invention that are essential for function can be identified by methods known in the art, such as site-directed mutagenesis or alanine-scanning mutagenesis (Cunningham and Wells, Science 244:1081-1085 (1989)). The latter procedure introduces single alanine mutations at every residue in the molecule. The resulting mutant molecules are then tested for biological activity such as binding to a natural or synthetic binding partner. Sites that are critical for ligand-receptor binding can also be determined by structural analysis such as crystallization, nuclear magnetic resonance or photoaffinity labeling (Smith et al., J. Mol. Biol. 224:899-904 (1992) and de Vos et al. Science 255:306-312 (1992)).

[0183] As indicated, changes in particular aspects are preferably of a minor nature, such as conservative amino acid substitutions that do not significantly affect the folding or activity of the protein. Of course, the number of amino acid substitutions a skilled artisan would make depends on many factors, including those described above. Other embodiments comprise non-conservative substitutions. Generally speaking, the number of substitutions for any given HIVEP3, EDN2, or LOC521287 proteins will not be more than 50, 40, 30, 25, 20, 15, 10, 5 or 3.

[0184] All of the compositions, articles, and methods described and claimed herein can be made and executed without undue experimentation in light of the present disclosure. While the invention has been described in terms of preferred embodiments, it will be apparent to those of skill in the art that variations may be applied without departing from the spirit and scope of the invention. All such variations and equivalents apparent to those skilled in the art, whether now existing or later developed, are deemed to be within the spirit and scope of the invention as defined by the appended claims.

[0185] All patents, patent applications, and publications mentioned in the specification are indicative of the levels of those of ordinary skill in the art to which the invention pertains. All patents, patent applications, and publications are herein incorporated by reference in their entirety for all purposes and to the same extent as if each individual publication was specifically and individually indicated to be incorporated by reference in its entirety for any and all purposes.

[0186] The invention illustratively described herein suitably may be practiced in the absence of any element(s) not specifically disclosed herein. Thus, for example, in each instance herein any of the terms “comprising”, “consisting essentially of”, and “consisting of” may be replaced with either of the other two terms. The terms and expressions which have been employed are used as terms of description and not of limitation, and there is no intention that in the use of such terms and expressions of excluding any equivalents of the features shown and described or portions thereof, but it is recognized that various modifications are possible within the scope of the invention claimed. Thus, it should be understood that although the present invention has been specifically disclosed by preferred embodiments and optional features, modification and variation of the concepts herein disclosed may be resorted to by those skilled in the art, and that such modifications and variations are considered to be within the scope of this invention as defined by the appended claims.

The application's sequence listing, which the Patent Office published only in electronic form, follows.

SEQUENCE LISTING (48 sequences)

SEQ ID NO: 1 - DNA, 255587 bp, Bos taurus
  unsure (10433)..(10484): unknown sequence
  misc_feature (10434)..(10483): n is a, c, g, or t
  unsure (23417)..(23468): unknown sequence
  misc_feature (23418)..(23467): n is a, c, g, or t
  unsure (47035)..(47086): unknown sequence
  misc_feature (47036)..(47085): n is a, c, g, or t
  misc_feature (101763)..(101812): n is a, c, g, or t
  misc_feature (107407)..(107456): n is a, c, g, or t
  unsure (158723)..(158774): unknown sequence
  misc_feature (158724)..(158773): n is a, c, g, or t
  unsure (165923)..(171676): unknown sequence
  misc_feature (165924)..(171675): n is a, c, g, or t
  misc_feature (173830)..(174024): n is a, c, g, or t
  unsure (196285)..(196336): unknown sequence
  misc_feature (196286)..(196335): n is a, c, g, or t
  unsure (199403)..(199454): unknown sequence
  misc_feature (199404)..(199453): n is a, c, g, or t
  unsure (205496)..(205735): unknown sequence
  misc_feature (205497)..(205734): n is a, c, g, or t
  unsure (210613)..(210664): unknown sequence
  misc_feature (210614)..(210663): n is a, c, g, or t
  unsure (234602)..(234939): unknown sequence
  misc_feature (234603)..(234938): n is a, c, g, or t
  unsure (247485)..(247536): unknown sequence
  misc_feature (247486)..(247535): n is a, c, g, or t
  unsure (250696)..(250879): unknown sequence
  misc_feature (250697)..(250878): n is a, c, g, or t
  unsure (254597)..(254648): unknown sequence
  misc_feature (254598)..(254647): n is a, c, g, or t
atggatcctgaacaaagtgtcaagggcaccaagaaggctgagggaagtccccggaagcggctgaccaaaggagaggccattcagaccagtgtctcatctagcgccccgtatcctggcagcagcacagccgccactcaagagggccccctccaagagctactagccccgcagcccttcccaggcccctcgtcggttcttagggaaggctctcaggagaaaactggtcagccacagaagccccccaagaggtcctccatcgaagcctcagtccacatctcccagcttccgcagcaccctctgacaccagcattcatgtcgcctggcaaacccgagcatctcctggagggatccacatggcagctggtcgacccaatgagacctggaccctcaggctcttttgtgacccctgggctccatcctcaaagccagctcctctcttcccatgcttccatcattcctcccgaggacctgcccggcatccccaaagtctttgtgtcccgtccctcccaggtctccttgaagcccacggaagaggcacacaagaaggagaggaaaccacagaagcccggcaagtacatatgtcaatactgcagccgcccctgtgccaagcccagtgtgctccagaaacacatccgctcacacacaggcgagaggccctacccctgcggcccctgtggcttctccttcaagaccaagagtaacctctacaagcacaggaagtcccatgctcaccgtatcaaagccggcctggcctcgggaatgggtggcgagatgtatcccccagggctggagatggagaggatccctggggaagaatttgaggagcccaccgagggagaaagcacagattcggaagaggagacgggcaccacttccacacaccccacagagctctccccgaggcccaaacacccactcctgtccagcagtttatacagctccgggagccagggttccagccacgaacgctgttccttgtcccagtccagctcggccccgtcgctcgaggacccagctccctttgcggaaccctcatccgaacaccccctgagccataaacctgaagacacccacacgataaagcagaagctggccctccgcttgagcgagaggaagaaggtgatcgacgagcaggcgttcctgagcccgggcagcaaaggcagcaccgaatctgggtatttctcacgctctgagagcgctgaacagcaggtcagccccccaaacaccaacgccaggtcctatgccgagatcatcttcggcaagtgtgggaggatcgggcagcggactgccatgctgacggccacttccacccagcccctcctgcccctgtccaccgaagacaagcccagcctggtacctctgtccgtgccccggacgcaggtgattgagcatatcaccaaactcatcaccatcaatgaggccgtggtggacaccagcgagatagacagcgtgaagcccaggaggagctcactgtcgcggcggagcagcatggagtcacccaaatccagcctctaccgggagccactgtcctcccatagtgagaaagcgaagcccgaacaatcactgctgagcctccagcgcccgcccagcaccaccccccctgtgcctctgctgagaagccactcaatgccttctgccacctgcaccctcagtaccccccaccacaccttccgaggcagctactccttcgacgaccacgtcgccgactcggaagccctgagccgcagcagtcaactgtttacctcccacccccggatgctcaagcgccagccggccatcgaactgcctttgggcggagagtacagttctgaggaggcagggcccagcagcaaagacgcagcctccaagcctgcagatgaaccggaacccagggaaagcgacctcaccaaaaagaccaagaagggtttgaaaacgaaaggggtgatctatgaatgtaacatatgtggtgctcggtacaagaaaagggacaactatgaggcccataaaaagtactactgctcagagcttcagttggcaaagccagtcaccgtgggtgctcatgtatcttcggaggccgagaagagccaggccgagcatgagccctggtcccagatgatgcattacaaactggggaccaccttggaactcactccactgaggaaaaggaggaaagagaagagccttggggatgaggaggagccgcccagctttgagtccaccaagagtcagttcggcagccctgggccttcagaggctgctcggaaccttcccttggagtccagcaagtcaccagcagagccgaataagtcagtgccctccctggagggatccgcaggcttccagccaaggactcctaagccagggtccagttcagaatcagggaaggagaggagaaccacgtccaaagaaatttctgtcatccagcacaccagctcctttgagaaatctgactctctggagcagcccggcagtttggaaggggaagacaagtctgcggcccccttctcatcacccccgcctgccccgcacggacgctcggcccactccctgcagcccaggttggtccgccagcccaatattcaggttcccgaaatcctggtgaccgaggagcccgaccggccagatacagagccggagccaccccctaaggagccagagaagacagaggagttccagtggccccagcgcagccagacacttgcccagctcccagctgaaaagctgccacccaagaagaaaagactgcgcctggcagagatggcccagtcatcgggggagtccagctttgagtcctccgtgcctctgtctcgcagcccgagccaggagagcagtgtctcactgagtgggtccagccgctctgcctcctttgagagagatgaccacggaaaagccgaagccaccgggccttcatcagacacacgctccaaacccttgggcacccacatgctgaccgtccccagccaccacccgcatgcccgtgagatgcggaggtcagcctcagaacagagccccaacatctcccactccacccatatgaccgagacacgcagcaaatcctttgactatggcagcttgtccttgacaggcccttcagcaccaactccagcagctccagtggcctcagcagccccaccagagagaagaaaatgctttttggtgagacaggcttctctgaccaggcctcctgaaaccgagccagaagccacccccaagggaagacaggagagtgaggaaccaaaaccctcatccagtaaatctttggccaaaggcgcattgctcccagtttcctctgcagccacctcacacagcgggcacccaggaggcaagagccaggtgcaagacagaccagcgctgggggccactccgccctacacagaagcactgcaggtgttcccccaccccatcgctcagctcccgttgcaggagaaaccctacctgcccccgcctgtctcccttttctccttccagcacctcctacagcatgagccaggacagtcttcagagttcttccccacccaggccatgtccagcctgctctccacaccttactccatgccgccccttcctccctccttatttcaagctcccccacttcctctccaacctactgttctacacccgggccaactccacctcccccagctcatgcctcacccagccaacatcccattccgacaacccccttcatttctccccatgccttaccctgcctcctcagcactttcttctgggtttttcctgcctctgcaatcgcagttcacccttcagctccccagtgaagtggaaagccacgtgccccagatcaaaactagcctggccacactggcaacaggaacccctggcctctcccccagcacagagtacagcagtgacatccagctgcccactgtggctcccccatccagctgctcagcacccacatcagcccctccactggccctgcctgcctgtccagacaccatggtgtctctagttgtgcccgtccgcatccagaccaacatgccatcctatgggagtgccatgtacaccactctctcccagatcttggttacccaatcccaaggcagctcagcaactgtggctcttcccaagttcgaagagccctcatgcaaagggacgtctgtgtgtgggacagatgcgtatgaggtcgggcccagactggctggagtaagtgaagaacagagcagaggtttcccgactccattcttgagagtgcctgtgacattacctgaaagaaaaggcacttccctggcatcagaaagtgtcttgagcctggaggggagttcatcaacagtgggaggaagcaaacgtgtcctttcaccagctggcagccttgaacttaccatggaaacccagcagcaaaaaagggtgaaggaagaggaggcatctaaggtggatgaaaaatttgaacttgtaaaaccatgtagcgtggtgcttagcagcaccgaggatagcaagagatcggagaagtcctacttgggcagtcagggccagggcaggagggaactagaaacactctccagcctgtcctcagatccatctgacccaaaggaaattcctccccttcctcagccctcattgccccatgtgacaacctcaggatcagaggctttgaaggaatatgcccaaccatctggtaaacctcaccgaagaggattactcccatcaagtgtgaagaaagaagattccaaggaacaagctgacctccctccactggcacctcccagctcacaatctctgtcagaaacatcccccagaccagccaagttgcaagaaggtacggactcaaagaaggtactgcagttccccagcctccacacaaccactaatgtcagttggtgctatttaaactacattaagccaaatcacatccagcatgcagataggaggtcctctgtttacgctggttggtgcataagtttgtacaaccccaaccttccaggggtttccactaaagctgctttgtccctcctgaggtctaagcagaaggtgagcaaagagacatacaccatggccacagctccacatcctgagacaggaaggcttgtgccatccagctcccgcaagccccgcatgacagaggtgagttcagtcttgtttttcttctactccctgattgtaaaagcctttgctgagcttttaaagccacattctcctcaaggtccatttgcaaaacgagagccaactgagtggacagatttcctctctatcagctgtgactggccaccttatttattggatttctttgtcagtgtccctcaaatcattggactagatgcatttcaataaagtgaactttaaagtgacccactttcccattagcttctattgaaatatcaaagaaacaatcttatccaaaagactgagttcgtaaaccttgctgatgggaatgcctgcaacagtttgagaattttatgccactccaacatatatttcttccttacagtgttagtcttttcctgcttttcgtattctctgcatctactatttctgttctctggtgccacttgagattttctcagagagtctagagtttgacaaaaaagactcctgaaatattccttttttcttttatgtgagtagaagagcaaatagaccttaactgtagtatccctctttaccggtaggtgacagttccacagcttgactcatctttgctgatggtagtgcacaacgctggcaatgctcatgttttctcctccattgcctctgacctgaggctgcattaggaggcatgaaatcttgatctctgcaagttcaggaagattgacatttgataattccaagtttgtttcggactggtgacacctccatatcctggtgtcaccttgtcaggtgacaagggcagcgtaaggattcaagtcatgatgtgctatgctgacttgatatttgtggaataacagttggtcttattggttgagtagcctcactgtgccaggcattgttctgggcacttgaatccagttgatgttcatcactgcctgtgaggtagcagtaccatttccattctgtagatgaggaaactgagagtcagaaggtgagaggtccagagcacatggcaactatttggcaaacccagaatttggaccaagacctgtctgactccagagagtctattttcttctttcaattattcaaggaaagaagactgtaaaagtgactgcaaatttaaagatcttcattagtaagtctttagaacagatcctttgaccaaataaatccccctaaactaaatcctgattgcagataaatgaacaaactatgttcattaacttctgcatttgcatcctcttttactgagtgatgcttgtgcattgaatttctccttagctcgcctggatattctgcaccaaactgtttcccaaatttattctctaaatatccttgtcagtctactgctgctgctgctgctgctgctaagtcgcttcagttgtgtctgactctgtgcgaccccatagacagcagcccaacaggttcccccgtccctgggattctccaggcaagaatactggagtgggttgccatttccttctccaatgcatgaaagtgaaaagtgaaagtgaagttgctcagttgtgtccgactcttagcaaccccatggactgcagcctaccaggctcctccgtcggtgggactttccaggcaagaacactggagtgggttgtcattgccttctccgttgtcagtctacagacatccttaaatgagatttccactattgttatacacatcacgactgattttctctccagtgtctcttactggttgtggctactcctgagatgctgtggtaattatagtcatactgagaacttattgtgcacctattatgtaccaagtactatgcccaacatgacttttttcctcacaaccacattgataggtttctatatcatgatttgatggataaagagaccaaagcataaagaagtcaggtaacttgcacaaggtcccaaacatagtaaatggcctggattcaaaactagatctcactctaaagttcttttggatgatctgaactgcccctctgtttcaatgactgaacactgaaaggtggtttaagaaaaacaaagaattaatttggcttaactgggtttgacaacaagttgtttaaaatgctgctttcctaaaatgagctgcaactttttcctggaatatctcatttggttcacttggatcagctgataaagaatccgcctgcaatgcaggaaacctgggttcaatccctgggttgggaagatcccctggagaagggaatggcaacccactccagtattctggcctggagaattccatggacggtatagtccatggggtcgcaaagagtcagacacgactgaagactttcacttaaacacttaaacttagcgtgtttcctaccagaagctcaccagtctgatacattactgtaactgcatagcccactgcttgatgcctttctacaatcatccctctctctggtctctgcttgcattccagtgataggttgctcaccaccccttagtacaacccaacccatctttgggcagtgctttaagaaagttccctattatattgacctgacatttgtcatcccatagcttccattaactgttagtagctctgaaaaggccctttgggtgatatcaggatttcaaagctcttcctaaccatctttatacaggaatagaccacccagtcaggtttgagtttggtcacatacattttttttttttttcatatgtaaaccatggggaaacccaagcttatacaagagttcactttgcagccacatttcgttccccaagtttctccttcctttttcctccttggcaataattttgacaaccgcatgcactattgcaaagagattaagaacaagggcttcagtgccagattgcccaaatttgagttccccgatctcacttactaattgactttggatcagttacttaacctctctgtgccttggtttcctcattggtaagacagagataaaaagctgtaagatagaaaatacgtagctcataggaatgtggagataattatatgagttaaaatatgcaaggtgtgattagaacagtggttggcacactgacacttgataatcactatcttcagttactcacattattatctttaaaacttaaagtgtatccctggtcccctgctcgagtccaaccatgtttcctggtagagtgtctgctgccaccaacaccagcctcctccagcttggctctgacatcacagctatcagcctgagggaggcctcttggtcattccatggatggcccagatggtaggctgacatggaagtgaaaacagcatgctctgaaaacctttgagtattgcataaaatcatcgatcttttgctgaagcggcacaccataccttctcttggtttccactccccatctccaattcagaagagattgtcagtgagtcactgaatcactaaagctgatcctggaatgaatctttaagatggtctaatcttgactctgagcctcagagaggtgaattaatccacccaaggttggctcagtttgcagtggcctatgtgatgcaagaactcagattccttgatttccaatcagctacttttctgttcagccccttgtaggagcaggtgtggtggctgaagcagggatttctgtccttagattgtcgcagcaccaggggacacagttgctgctcctactggctataaacagggcagttcctcctgaccttaatgaaatggcatgaagcaggatgagaatatcactgccagcctcagcccccagcccagcatcactgctctctattaaaggtgcacccatccctgccaccatcagaggatctaggggacaggttatccacccagctcttaacaccaaggcctatagctcatgaagagaatgggttccctaaaatgcccacccccccagacacatgcccatcagtgggcagcacagcctctctgtgtccagctctggcagcagtcgggggtggggtcagggccttcaggagacctgctttatgctcctagaaatgcccttgacttgctgtgtggctttgacttcctgatgtataaaggagaattgggccagttaatcttcaaaggtgaagtcttcatttctgtatgcagcattcctctcacacaccttctctgaggttggcatgacccaggagaccaagatgaggacctgtccccagaagcccctagactagtgtgaaaaaagagaagaaacacagctctcgtgggaaggcctggtcttccctagagaaaggcctgggcagagtcctggttctgacttcacctctggggattcatttcccttcttctgtaaagtggggcaggtagcatcttgtctccgggtagagggagaatgaatgaagtgagccatggtgaagcgtgggcatcattccatgacggcgtgttaaccagcagtgattttgttgttcctgcggtgggccaggttcgcctcccttcgctggtttccccggaaggacagaaagagatagctagagtggagaaagaagaggagaagagagggaagccggaggaggacgctcccgcctccaagagaggggagccggcgaggatcaaaatcttcgaaggagggtaagaattatgtttggtttgcagtgtctgctctccacgcagtaagcgctcgtgcccgcccgcaggctgggggtggtgcctgccttctgtgttcagaacggtgatctgtgttcagaggtggtgagcatctcatctggcaaggctgtgtccacaggagccctgggctttccaccttccaggaagtgccatctttgtgggacttgctggccacctctgttaaggaacattggctccttggtgggggctgggggacaccaggtatatgctgggcactggaacagtctgggtcttcccccagcccctcttgcctcagatgctggctgggttcctagaccccacattggggttgatagtgaccctcccgggtcctatgcggactgccgtctacgttggtacatgttctgcagaagtcacctctgtcctgcctaagcagccacagtgacaggtctgaggtcccatgggctctgccaactgggatgcttacagggctgatggtgcactgcactcatcagctgtacatactggtctctgggtctcttcctggactggcctgatccaggacttgttgatttgtaaacatttagaggaacgcccctggtttttcaccttcggtgctttgtgtttgtcaacctaatgactgaaacagctcagaattctcagctgtggggctctcggggctcccagaaggctgcctgcttccaggcctgctctgtggaagtgtcatgcgagctgtgttctgtgtgaccacgtgcgtgctccctgggatgtgggtgtctgtacgcaggtcccgtggtgtctgtctcagggtcctgtgtctgtgtccccagtgtaatcaatgcagccctcttcctacccagtcctgagggatnnnnnnnnnnnnnnnnnnnnnnnnnnnnnnnnnnnnnnnnnnnnnnnnnnctccagcacttgcaagtgcccagttcacaagatcaaagtgggaggtgccaggttcctctggagcactgggagaggagacagtgcccagctcccgaggccactggtgggcatccttcggcactgaccaacagggtctcccaggagaaggggtgtttgaaaactgaacttggggacttgtgttgtcacagcaatagggaggggagtcagggatggcaagcatccttcagtggcaaggacacgtccccaaaggggagaaatatcttgcccagagttcccgtaacttctccattgagaaacactagaccagcgggttttcgaaacactgtctttccacctggggactggcgggtttcctcttctgctacttggttagagcgcccccgtgtgtctctgtgttcgcacatcatcggatcctccaaaggccatgtaacatttcaccccaggattggtggatcaggcacagccttctccctgcagcttcaaggaccatctgtggggtcccaggggtggctgaatgtcagctggtgtgaacaaaggggtctgcctctgccttgagaggcaacagtccccagactggagatctggttccctgaggcagttcccttgttctgagccccgaaagggcagctggaaggagcctttccccagcccagttagttaacagctccagcccctcctagagtgagaggtgaaggccacgtctgggtcctcttctcctctttctgcagtctggccaggggtccccactctaacccacccccaccattccatccaggtcatcacttagtcccacccactctgttcagaatctccctgtcttgccaggtccagcatccctgccccagagtggctctcccactaacctgttccactgggacagtctcctcacctctccagctctgcctcccatcggtaaaaggggtaattacatacttggtgggttgttgggggatcttgtgctgccctatgtaaagaccagctcagttcatggtgctaacaaatgggtattggagtacttttttcatttttgtgtccattgttttgatcccctccaggataatctcactctgtcgactgtgaggaacatcaccctcactctctccacttgtcacatttaatttcagcactttggtagggggaacggtaatgccaccagtcaggtcatcttctcccacagtcccgctgtcccatctgggcccctactgtacctactgtacctcccaccttcgcttctggtgacccctcaatatttatggttctttgggggctggtgtcaccctccaggagagtttgcaaatgtggacttgaaagtttagggttgtcacagaacttccaagtgctctgtaccagaagatagccagagccaggagggtcaactgtgatcctgctctcatggaggctggctcaggggtagcagaaggcctggagctgaaatgtggggacccctgggcccagagtagccagagagggcttcctggaggaggtgggctgggcctggagggtatatgagacccggacaggcagagaggaaaggtgagtcagacggcagtctgggtgtcctggtgactcatgcacctggtcagtcggactcgtttcctgtggccttgaacggtctccctagtcagtgttgtccgcttccttggctaaacttcatccctgcaccaaggacatgaaatctgaatctccagctaggaccttactcctgaactgtagaccattgcttctgatgcctcatgggcacctctgcctggaagactagggcacctcaaacttagtatgtgctgaccaggctctacaggtaccaccaacagcatctccttccatcttgggaaccagatccttaggctcaaaacagctctgtctcatctccattaacaaatcctgtcaactcaccctgtgaaaccacatccagaagctgcccatttctcccacgtcccagctcaatcctctgctgagtttcatctggatcgtcacagtctcctgctagaatctcctgcttccattttacccactatcatgtactcttaacccagcagccggagcaatcccgtttaacatcagcagaccctgtcactcccactctgcacccttcacagacctccagtagcctgcgtgttctagccccagatcctccctgacctctgcctgcccctctaccccttgcttctcctttttcttttaaataggtcttttaaaaatttttatttatgtatttattgactgagcttggtcgtcacatgagctttcgctggttacagcaagcaggggccacgctctagttgcagtacgtaggcttctccctgtggcagcctcttttgttacggctcacgggctcgagagtgcaggttcagtagttgtggtgcataggcttagttgcctcacagcacgtggagtcttcccagaccagggactgaacctgtgtcccctgcattggcaggttcctaccccttgcttcctgtgctccagccaaggatctctttgtctgacatgttgctaccttagggcctgtgcacttgctgcacgctctgccttgaacacttttttcagagtcccacaggtccctcacttccttcagtcaccttcagagaagccttaccagatcaccctcctctctgtatcctcctccagcatttcttatccagcttcccttccctgctttatttttccccagtcactagtttacttctgtttccccctccagaacatacaccctgtgagaggtcaggaattgtgctttattcattgtcatatccccagtgctgaaaatggtgactggcatgtaggcagcgctggtgaatgtttattaactgaaggaatctccctttacctccctgaactcagcagcccttagaatccatgagcagtggagactctgggtctcaggaaggaggaaggacagagagtcagggccaacccaccaacctgacgtcagacttggcctgggaaggtgaagttgggtggcttcggctatggggcaagcaccctggggctgggagccaaggttgtttgcttgctgacctgccctgcaagtgttacaggtaaaaaacgaaacatgattccaaaaagggctggctcatgggttaccagcttcctggccagtgcctgctctgaatagatcctttctgtcctgggggccagagaggagtggtcctgggcacccaactctggagacaggccgctgtccttcctgggtgagtccaggctatcagggccgtgtcttctttctgactcagtgccttgatccctcttgaatgctcaggcttctccctggagtatagatgtgcagctttgagtgtggccccttgggccaggagcgagaggtcctgcttctgtcacatgttcccacactggctttagttctctttctatttctcccaaaccctgttgttccatctctcctagggaagacctgggcttttgtggacacagaggagggtgggatattgcaaagcacaggtgcgatattcaatggcccagaccagggagatggcagtggagatgggggtggagctagaggacatctggtgaatcgaatacaaagggtagggatgagaagcttggagtggagaatgactgccacgtttctggctcaagggtatatgaagctgccatttacggagatgggcagggatgggaaggagagtgagaaagaggtttggggaaggaggggtcaaagcttggtggacagtgttcagtttgaggtgccagtcagacatccaagtgttcaggaaggcgtgtggcaattggatatctgagcctggccttcagaggacaggaaaggtacatttgagatatgtgtagatattcacatttttcagtgcatagatgctatttaggaggatgcaactggatggtggatcacttggggaaatggaaagaaaagaatagggcatccaggatggggccgggatatgccagaggagaggtagagatgaagctgcaagagtctgagaaggaaaagccaaaagaatagaagagacctggcagaatgagaaatcctggaagacaagggcagagggagttcaaggtcagctgtgctgagggccatttaaaggccaaggacagggaggccaggcaagtgtccgtgggatatggccacatgggggtcactggtgaccttgatgggagctctttggggagatggagttctaaaggtggcgcatgtaaacctgtcccaagagtctggttatggagggaaggagggaatcacaaggaagtgaggagcaggacccggacatatgtgtgtgaggctgagcaggcgatatttacatggagagatcctccctaggcttgtgctgctaggaatgattgacagtaggggtgggtgggggagggcttggcagatgatgatgctgggagagaaggggctgagtgcaggcagagtcctagaggaggtgcaaggtgtggggccaagcactgatgagaagggggtgcttctcctagagtaatggtgcggggtgaggggagacagatgctgacgcactgcaggcagaactgatggtttggatgggggaagcggggagggttctctcagcccccatccagacctcttcttgccgttcctagatacctacattctcaacaacagatctgtgaatggctgttctgtttctaggaaaccacttagattcttgggaaagttattcctttgtaaagattatcctccaaatagatatctcagatgtaaagccatctagttaggtcgactctccatgctggcctagcatcattctactgaacactcagaggacttcatagggaacactcactccaggcattagacaaaactgattatgtcactatgaaacccagtaaacactgtgaaacgacagtaaaaaaaaagaaagaaaagaaaagacatattgatcaaggggcagactgagtgtctgagtctgctgggcccggagtccccagggtcttgaggatggtcagggaagacctaaatgcatcctattaaaatttaaaggagaatccatttctcaagcggatttggcctctggttgctatggggtctaaggcagcaagaggctcagctgagggggtggggctgggaagtggagtccccaccccagtgtgcgatggccgccggcagctgcaatgagcactgggcatcccctgggcctggaccgcatctgcctgagtctccacctgcctcctccctgtcctgggggatccccttctctcctgtgggggaagcggcctcttagcaaacagtggcacacactctccctctttctttcagtttttatttttttatttattttttaaaatgtatttttattcgtgtatttatttgcctgtgccaggtcttagttgtggcatgcgagagcttccgtcgtggcatatgaactcttagttgcgatatgtgggatctcgttccgtgaccagggatcgaacccagaccccctgcactgggagggctgagtcttagccactgtgtttattttatctaaattttacatgcacagagttgaaaaagccaaacatctctataaattttgttatggaagacgatagtacccttctttcccctacattttctgccctgccccacccccaccccagaagcaataactttcatctcttctagctgattatcttggttgaccttcgtatctgtgaataatgtgcctgggttgctactcttgggcttttcagctttaggtgctagctagtgactcacgagcctttccccagtccacacgtgacccctcatcccccatcctctcatcagagtcgtaccatttatgcttcacagctatcttatatgatacttttgctttcctatacaacttttattttctctaggaataaaagttgtatgtgtgttaacttcatcagttttctatatgctgtgctgtgcttagtcgctcagtcatgtccaactttttgcaaatcccatgggctgtagcctgccaggctcctctgttcattctccaggcaagaatactggagtgggttgccatgcctttctccaggggatcttcccaacctggggatcaaacccaggtctcctgcattgcaggcagattcttcaccagctgagctaccaggggagccccagttgtctatatatttattgttaattcaacccccagattctcacttcacaactctcccctgaagacgttcagatgcatcgggtcctctgtaaatcatcttgcagacacagtccctccctgagggatcctgtggactccaggccacacgggctgctccctcagcctggaacacagctgctaccccagggctccctcactctcaccctagagattctcttgcctcctatgcttgattgcctcatagccgtacatcttcccttttcctggtttacttcctcattttcacagagaccatccttcagcatggccttcttgagaaagggcctgtgagaggtgagctttttcgatgctttgcatgagtgaatggattgaagtgtttttattatgttcctcagtcgactcaagtgtctaattctgggttggaagtcattttcctttagagttttgaaagtgttgcttcctcctcctcaagcttctgggttgttctcaagaattccagatccatcctgattcttgttctatcctctgtgactgtctgagggtcttctcttcctgcttagagtggcgacttctcaagcgtgggtctcggtgtggagcagttttcatcactcgctgatgctttcaatctggcaagtcagggacttctgctttaggaaactttcctgaatggtttccttgaggattttctctcctctggttttctctctcctctctgtggtactcctgttattcatgcgctgagtaagtcctggctcgttcctctaatttctatgcctctctgccagaatccccatctcttcgtatttttgctctcctttctggggacctctactttatcttccaaccattcgtgttttccatttctgctatcacatttttaattttccttgcatgttcctcttatattaatagtatcctattctttttttattgagaatatctttatttatgtacttctgttagttaaaatattctctattttttaagttgagtgatttttttaaatttttattggagtataattgatttacggtgttgtgttcgtttctgctgtccagcaaagtgaatcagttatgcgtatacatatatccactcttttttagagtcttttcccatctagggctttacagagtatggagaagagttccctgtgctatacagtaggtccctactagtcatctattttatatatagtcgtgtgcatgtgtcagtcccaagattccaatttatccctcctcccttttgccaccctggtagcaataagtttgttttctacatctgtggccttatttctgtagtgtaaataagttcatttgtaccaagtatcctattcttatttgactgattccaggcctctcggaggctattaatgtcagttgttttgtctttagtgttcttttccccttgatttctgtttccttcaggttcccctcacccttggctttgtttagcctcttctctcaggtatctgataacctctggtgtcttcgcatgttaagagcgggaggctcaaagatgcctgggcacctgagtgtgagagcaaggcttccccgagactaggctgttctactgcggaggctgcagtggcagagtcttgtgtctttcttcttggatgaagactccagcctcccacctgaaggtggcagggttcatttcccataatctgagagccacagaaaggaaaaaggtgggacgcagagcgaagggggatctcagcctccagtgatgctttcactccatcccttcatttgtttgcaattccccatcctgccatcacctggcctgaaccccctcagaggccttccatctcaccctttgcagagaataaacctccaggctttttcaggagtgatctggctgctggagttgaggaaggtgaggtctgactgcttctaacaggactttccactagttgtccttatcttggtcctccccgtatgcacctccagagtccttgaggggccctgtggcataagtggagtttattctcatataacctgctgtcaacttagattccattctgttgggtctgcaaagtcttgttcagccatccgtctctttccagcttccaaaactgcattgccagtaccctctcctgctcttcccttctttgtgtgtttattatgccgagagagagaagcaaggggaaaggaaatataaatactgtttccccaccatctttaataacaggcgactagtagggttgatttttagaatgttttaggcacagaactcattcttccaaatagctcttctgagaaggtcaccctgcagccttccctataggtccttggagcccctgtggcacttccttgaacttctgggctcagaggagaacaggggaaggtgttggtgttccataaagtctgggaagtctttgggcattggcctgagacagaatgggattctaggcccacctctggcaattactggctagtccctaaagtaggttctttagtgagaactaaatggtaagattctatgggctctttactgtggcatataggaagtgcttagcaaagggttctctgccttccttgcttccttcccccttcactgttctttccttccttccatcttcctttcctcccacctccttccctctccagcatgaccatgatcttccccaggctccagtggcctttctccccaggcactagagagctgctgaaggtgttagccaggctctgtctctaacagctgtatgtgaacagtatatcaagaaggtgagagttggagactaatctgtggacaatgaaaatgaaatcaaaaaagagaaatgacacttgggttgggcaggtggaaagtttgactctgggttgagcatgggtccacctgaatttcattatctgcaaatcataggaaattttgccttttccatctttgggcgttgtttgaaatgaggcctccttgtcggagggagggaggtaagtggggtgggtcccagagctggagactttgggcaaatcatcttttctctctggactgcagtctctccctcagtaattggaggatatgggaaagggcttgggtcttggagtccgggactgggagctgcatcctgactctgcctttactggtgctgaggccttgagtaggcctttgctctttgtgaacctggctttctcatctgtagcatgaatggtcactgtgcggcttgggtgaaccatctctggctctcatgatgtgcggggtctttccagctcttgagctccagagctgtttcagctctgcactcagtacttgaggaagatgttgttcggagacagtttacagagaggggtctgagtgaagggcctatgcaggctgctgcaagtccttgtctctccctcagagaagctgccttctctaaaggtcaggaaatctaagccgagctcatctgcagggtgcccctgcctgagcaggagactttggcagtgtgccccagcctgagataagatatctgttgggaagaatttcctctcagagcccagagttgggtgttgtgtactgctttgcctggacatacacaggtgaggagatgaggggggcaatagacatatcaaatctctagaacttgccagaaaaatgaggagcttagaaaatttaagacagagttggaccagaatctcttggaggaggggtccctgctgtggtctgtcccccacaagcatcagctgctccttgctgcccacagtggggaaggcccagcctcgggataccctccagaggccacatcctgcctcctgtgcccacccacctgagtatcttcaatcatgctcttcagtgcctccctggaagtggagatacctctccatgccactgtgaatcttaaatagaatcagaccattaaatagagtcagctgtccagggtctggcccaacccctcccactgcactgccagacagaggggatgagtggcaccttgcagtcccaccccctgagcagagccctgcatctcagttgagcagaacatggggacgagagcataacttcggcatcagccagacctgggttcaaattctggttctgccactgattagaaaatcatataacatctctatggctcaggtttctcatctgaaaaatgggaataataatagcacctgttgagcaaagctgagaattgaaggaaatgatgtttgtatatcatgtgcccagcatatgctggacctcttaatctgccatgaatgatcggtacttacttacatgacggcctcttccactgaggagtcagcgggtgtctctctcttccgcaagcactctgtggtagagtgagcgctgaggccagaccacctgcgtgggaaccctggctctaacatggcaaccagctgatcataagtgagttaggtaattgctctgtgcctcagcttcctcatctacaggatgaggacaataatagcaattatgtctcaaagagtccatatgaggcttaactaagaagccacatgtaaagccttggcagtgcttgatgtgtagtaagtacttaatcaaagtccactgttatcattattttgaaagggtccctagaaatcatttgatccaaattcctcaccttgccaatgaggaaaccacagcccagggaggcattaacacagcatagcaataatagaagccagcctcttggccttcactcagaacacgccaacaggaagaagggaggaaggctgtgtggttgagtgtgtatgagggcacaggatctgtgccatctcgctgcggccttgctgatggcagggaggtggcattgtggtgaattaggctgggattctgacgcactttcagctcccatgaaaagagacgtttgactccagaggatcccttgtgttcaagagctaacagggtggcctggttggggagacacaccctagcggtttaaggagggcctccccccgccatggggtggaccctacatggagagttagagcccgaccagacagagaggcctgacgtggccttggatagaaggagcataccctggagaattcagggctgatggttcatggtgttggcaatttgcacttaaacagttccggaaaaaaagaatttttttagaactatactttcaacatgtttgtgattgtttaaaaataaaaacttaaaaaagagaacgaactagtttggctcagaagaaaggagaccagggaagccaggaattgaggaaagagtttaaaagggcagaggctgtcaggggctgccgggcagagctccgaacaagcagaatcagccaaggccaagaaagggagctaaaggcatcagatcagacaaagagccgggcctgaactccaagcagaatgttggatctgtgtggtggatgggcgtcctctgtcaccataggtggcttgcaggccaaagaaggacagcccagctggtgggagctgggtcccggggcacagcagccagagaaggcagcctgggctggagcctgggtaccaggcggcgggcgtgctgggcaggcctgttcccaggaacatggtgacagcagacaggacggacacaggaggcaaaacaaacctaaggcagccagggaggagccaggctgtgagcgaggccttatgccccactggcaatgcagctggcagactggggccaggaggcggccagccaggggccaggccgggcttctgggaactggagccaggagcagacagggcgcttccccggggaaggctgcgaggagtagggacagccagcagggcagagggcggagaggctggtccgccggctgtgctgttcagctgggaggcaggacctttaggggcctgggagggcagtgtgttcacccagtccagttgagcccaggctgattcagaaagaagaggagccaacccctagcagagaggaagaaaccagttcccatcaactttctaaacatcagcagatggagcagtcgggctgtctctcggaagcatctgagactgcttagctcgggagcttgggcccagaccctacaaaccacgatttttctgagctttgtcacctcccagcgtctgccctctgttggttctgatttcaccaacgagtggtgaacccttcccgtgaggagggcagctgaagacgcatgtcctcctctcagtggtcaggggtcgggaaggaggaggggaggggctgagaggaggtggtggttggatgggtctggacctggggaacagagtgtccctgaggatccagccataggctgagcggtgacccaggagctccagctgaggctgaaggagccagcatgctgtggattcatacaggctgggccgtccctcacctggactccagcagggtgcccgtgaggtcttgttgctgcaggaaaaggcccagcagtgacccacggatatccccatgctggtccaggctctttcccttcccccttctaggggccagagtacctttagtcagccagcccttacctgaggggagaggctattgtgaatgcagtggggcctcacctggggtctggcaggacagggcatccatcatgcttgctcaaatcctcaccaaagaatcctaccccttcaccctcttccttgggtctcctctgcccggtgtgccaggaagggccatcccagcgcagacaacacactgaaagcagccagctgggctcctcaggtgttggaccgtctccctagtacaaccttgagactcctggatggcgtcaagcactgggttcctgcaggaagtagtaaggaggaggttggggttccagcaggctgtgcacacaggcctggccatgcaccatagggacccctctctacaccccacctgctgggtgggcctgggtgccatccctttcctctcgaggaatcagggtgctttcacccacaccacgctgggaaggttgcttccatcctcccaagaatccttcatgtgtcttgtcccctccctggactcttgggcccttggctnnnnnnnnnnnnnnnnnnnnnnnnnnnnnnnnnnnnnnnnnnnnnnnnnnacccaggagccaccctggctctaccccagtgagctggctgatctgggacgaaccgttagcccacctgtgcagctgctccttttctagggggtgactggaatagggcggcctcttggggttgaggtgaggcttaaatgagaaagcctcgatcgcatcgccccagcggcatggaaccagtgtgtctagagacggagtctggctcgcctggaaggacgctggtcaggcaggacagaggcaggaatggtggcggcggggagggatcaggagtgtggcctctggggccgggtccttctgcatcactgctgggtgtgtgacctggcacagtggctcagcccctcagtgccccctttctcatctgccgtgtgggaagagctctgctgacacaaccaagggctgttctgaggaccaaacacataaacgtggcagcttggtgagtcccacagctccgctcctggcacctcctggccggctttgcacacgcagctgttgaccaggaggctgggcggtacgtgggaagcacctctcagggtgcagcagtgagctgaggatgaggggcaggtagcaaaggcagagggtggaggagggaagatttttccagatggacaaactggcccaaggctagaggcttgtggtgctggcgaggctggagagggacaggagttgcagtgagtgggagatgagtaagccatggaggggcctgtgatggggtcatggggtcacaggtgtcagtgggggcggggaaggacctctgtcgcttttccattaaatggaaaaggccatattattcatccctttttaaaaaatgggaaagcataaatgaaaaaataactataaattttatagacactccatgcactggggctatttttaaatcccctgttattcctataactccattagacaattggccggaaagcctggctcagaaagaaccctgactggctccccagtcccctccagagcaccccgtgtttgattaggccccagaccacttccctaggtgccccagtccaagcttccagacatcccaggcttctctgcctctgctctttatcttgatgttccctccacctggaggaacctctcctcttctttagctccatatccccacagtggactgtcctcagagctcgagtcaaatggccctgttccatggagtctcccagacctttccccaccctgctgctgcctgccatacattgcctcttcttccgcagccccccagacccattgtctcaccttatcttgacttgcattattttctgtttggttcagacaaatgcatgttccccctcatggccagccttagagcccacaggcaggggaaatccttttcataaaatgcacttacagttcacaactgtaaactttaaaatgtaggcagtgggctgatgagaatgatctttggcatgctgtggtgccactcactagctttgtggctgagggcaggtctttgtgagtctctgggctcagtttctccgtctctggagcacagacagccatctctgcctcccaggctgttgtgaagccagaaggctggaggacacgtgcggtacctgcctccaatctcagcaaacactgaggagagctgtgggaaaccttagcaggctctgttctcatccagccgctctgagctgattctacatctcatctgggtgtcgttctgatcacagggttgccttcttgccgacggttgctctggaaggcacttcacgtggtgtgaacggcagatgtaagtgatgttccagggccagtgtgctagagagctgtcctcaggcctccaggagaggctgtgcactgactcagttctctactggtgcagggaggtgtggactcattgggatggagcagccctttctgaggaggtcacacccagtcccgtcagcaccagccccactttggagacgggagtctctggccaacatggtcctggctctgctgtcaatgttagtcactcagccatgtccagctctttgccaccccatggactgagtctgccaggttcctctgttcgtgggatttcccaggcaagaatactggagtggattgccatttccttctctgggggattttccaaacccagagatcgaacctctgtctcctgagtctccagcttggcaggcagattctttatcactgagccacctgggaagccctctgctgttaatgcctgtgtgaatttgaggggggacctcaggcaacttactgatctctggtgaccactgattgaaatgcagcacatggccccctggactgagccctgtccactccaacagtcccctcgccatcctgtccttcccttgcacccgcctaccctcccatcaacctctcccaccctctctgcaataatagcagccgtggcctattgaaggcttgctgtgccccaggtacagaactcagcactaaacccttcacaaatataatttctaattccatcaccccttgatgaatagtgtgtgtgtatgtatatatatatatatatatatatttatacacacacacacacacatacaaccattctccagatgagggggttgaggcccagagaggcgaaggaacttgaccatggtcacttgggtagtgaggaacagagctacaattcaaattcaaacctctgtggctccagatcctgggttcttcccttcacagccccctgccactaactggggaccctgctttctgcatcttctgattctcagtcacctgcatggcaaatcccagttgaatcctgttcctgcccctccacgtgcccctggccaggccctgagtggaccccactgagtgtttgtggatagagatgatggtgatggtgatggtgctgctggtgcggtgctgccccagggcccgtggtgaaggatggaattggcagggggaggtatcctctcccctctcataaagaagactctttggaggctgtctcagaagctgtaatcttttgagacttgcatccccagggtgagcagtggaatgaacagaagtgaggacaccagctccaaaaggtgagggctgcgcggggccgaggagagtggaacatgaggaaggcctcaaggagatggcccattgtgtgcttggggtgtaactcccagtccttgaaaaatgtcttcagggaggttcagaagcgtctacttcccctttacattagatgattccaaaagagccatgtccctggtggccagcacctcatgttcgttctctgggtttgctttttcacgtccagtgcctgatcatggccaggttcaccgaactggaggcagatgagatctgacaagttttcatagacatggcatttctgaaggataacagagctagtggtggcaacagtctgaactaaatgtatgagctctggaagctttcagcagccacatctctcaccctgcctccctctatgcagtgcccgtcccttctatcatgctaagaactctccaacgcattcaaagcttttaaccaaagagaagatgagatgtgatcagccagcaggagctcaagctgtccagggaccattcctgcttgtggatgtgccgtgaccccagccccatcctccagtggtgaggaccctcatttggctgcagcttcggtcagtcatttaaggtgacaggttgttgaaaggctacctgtaaacgtaaagctcacatggtccagtctgccaggcctccagggaagccttgttttctggttttcaagtgcaaaaactcaaatctctttattcttaaattcagaatttcttctaaatctgttcaccatcttgcacctctatcatcctgatataaatctgacggtttggttaacttcactgaggcttttattgaccctgcattttctttattgggtcttgatctttcatcacattgatttccatttcacattgatttcaaaactgtctcacatggactgctagagtatgtggtacaaactccctgtctggcggatcatgtgttgtaggaggaacaaatgctgccttcagccatgtattcagtatccaagtatggatgctggaatgcttcatgttccgagtcagcaattccatcttcatcactggaatttggtcctcaccatcatcctcttgcctatggtcgcagagggcttccaagggcttcagcatcctcatcagcatgttctgaattcctttgtaaatttgcctgtggctggggtggaggaggggatgatggagcttcagccctaccgcttcctgtatgagctggtcagtatatgccggggatggacattccactggcatcttagccccaaaccatggcttcccctttgagttgggagggaaggacatctctatgcttcacagtctatcaaaattggggacatttgttttccttacgttattttaatcttttgtccgtaccacacagcatgtgagatcttagttttctgaccagaggtcgaacccaggcccccttcattgacagcacagagtcttaagcactgcaccaccagggaagtccctcctcatattgttgaaaattaaacctaactgtgatgagcgctctcaacgcagagcgctagacagcagatcagatacagattgatccctgctatatgctaagcacagttcaaagcacataacctagactaacaaagttaacctcacaataaccccgtgagtatacatgttactttcaataatttaaaaaactgaaacagaccatacacacaaatggagaaggcaatggcacccactccagtgctcctgcctggaaaatcccatggatggaggcgcctggtgggctgcagtccatggggtcacaaagagtcggacacgactgagagacttcactttcacttttcgctttcatgcactgaagaaggaaatggcaacccactccagtgttcttgcctggagaatcccagggacgggggagcctggtgggctgccgtctatggggtcgcacagagtcggacacgactgaagcgacttagcagcagcaaacacacaaaagcaatccaagtcataaaagtacagtctatgagttatgacaaaatgatgtataattttgtataattatacaaattatgtccagttacccccaagtcaagaaacagtacaggatcctcattttacagatgaagcaactgaggcacagagaggttaagtaacctgcccaggatcacacagctaagggttcagccaagaggtataataataaagccataccacagccacagcgagctgctctgagtcgtcagccccaaccctgccacggggcaggaacatgctcagggccacacagctggtggcaatgaggcaggatttgaaccccagcagtctgaccctaccaaccccccaacccatgcctaaccactgcactctgcagcatcccaaacaaagcaagtggatcccaacttcaccacactgtagctgtgcaacctcagacaggtcctttcaccctccgagccatgaccacatccttccttcctgttttctcaccttatccccctgcgggctgtttgaggctggaactccaggttggatactggccatttagattccaactaggcccacctcaaatccagcctctctaccataggaatctattttgctcaaaacctgacttttagtctgtgcttacactatccatgctggggggctcactaccacccaagcttgctttgctccaagtttgtagctctggggttggaatattctattttaaaatgaacccagtccttcctacctgtcttggttttgcctgtggactgaaccacctcccaggagactgcattaattgtacttgtgacccgaggaatttgtggacaaatttctatgagcctggtttctcctctactcccagctggtagagagcagatctgctcagaacaagagccaagaaggtgcctgccatcatgggacaactagaatggaactctcttctcttcccctgtaagatttgagtctgtaagtctggggcccaaatacacagcccccttgtgtgctctgcaggttgaagcagctggtaatgccagctggccccttcttgaaaaggggtctgatgcgttgcagtagctatcctgctgccttcaaatatttgggaaagccttgctgtcattcagttcagttcagttcagttcagtctctcagtcatgtccaactcttttcaaccccatgaatcacagcacaccaggcctccctgtccatcaccaactcctggagttcactcaaactcatgtccatcgagtcagtgatgccatccagccatctcatcctctgtcgaccccttctcctcctgcccccaatccctcccaacatcagagtcttttccaatgagtcaactcttcgtatgaggtagccaaagtattggagtttcagcctcagcatcagtccttccaaagaacacccaggacagatctccttcagcatggactggttggatctccttgcagtccaagggactctcaagagtcttctccaacaccacagttcaaaagcatcaattcttcggtgctcagctttcttcacagtccaactctcacatccatacatgagtactggaaaaaccatagctttgactagatggacctttgttggcaaagtaatgtctctgcttttgaatatactatctaggttggtcataactttccttccaaagagtaagtgtcttttaatttcatggctgcaatcagcatccgcagtgattttggagccccccaaaataaagtctgacatgtttccactgtttccccatctatttgccatgaagtgatgggaccagatgccatgatcttagttttctgaatgctgagctttaagccaactttttcactctcctctttcactttcatcaagaggctttttagttccttttcactttctgccataagggtagtgtcatctgtgtatctgaagttattgctatttctcctggcaatattgattccagcttgtgcttcttccagcccaatgtttctcatgatgtactgtgcatcatgggatgcagggtatacccttaaataagcagggtgacaatatacagccttgacatactccttttcctatttggaaccagtctgttgttccatgtccagttctaactgttgcttcctgacctgcatacaggtttctcaagatgcaggtcaggtgctctggtattcccatctctttcagaattttccacagtttattgtgatccacacagtcaaaggctttggcatagtcaataaagcagaaatagatgtttttctggaactctcttgctttttccatgatccagcagatgttggcaatttgctgtcattgcctcacagctattccccagcatagagacacctgacattcattgtgggaatctgatgtagttcacagccttttcttatttgcatcttgaggcatacgaatctctgagcattgaggaaaccctgaggttccccagagcatggtggcatggcgcctcatagccattggcctgtaggcattgatcaggcacccaatgtctacacatatttcatcagctgctatcacagatggccttggtcaggctcccctcaactcgcccttgcatgccagcctcagggggtgcttccagagcacggctgtaagagaacactgtcaccatcccctctgacacaggccaggcttctgtaccagcccctgaggtttgtctaagccagcttccatccctgcttcttgccatatagaattgccgtatagaatcatgccaaggcttgattataattcctataatacatgcctaacactccacaaatgctagctgtttctttttccctaacaaaaaaaaacacctctgatcctggctgacgttctttttgtgctttttagtaaagagtaaaacatgcgtccagtctccaggatctggtcacttccccattcttgacctgtttcctgtctggggaacaaggaagtgaagctgggagaaccagccaaccatagtcctgcatcaggctggactggctccagtcacaacagggggcctctgggtgctctgggccatcccatcttaagagggacaacctggaggggttgggaaggtctggggaggaatctggaatccatcttgagcacatctgtttgaggcctggagcagaggaatcttggctagagcagcatcctttagggaccctcatgtgcaagagggcttgcactgaactgtgctcagactacagaaggtcaactttagcttagttaaggggagctctgcccagagtggaaggtgctgcctgggacaccatgagaccccaggtgccagaggtggacgcgcccaaggaggggtgtggatgggctgccctaagaatgacctcatcagagggtgcacgaggcccctcccacccaggaagttgaaggtttttaggtccttcccagcatgaatgtgctttaacagtgattttcaaattgattttaaattcacagaactcttttttacaaatagattcctattctgaaaaacagctcaatgcaatgagggacatggggacccagaaccctgctgctcagcctccccttccataaatcctgagcacagcgtgaaaggccctgcaagtcagggcctgctaaaggctggggcacccccatgtaaatgggcacctttaagaagtgcaccccttgttggtagtttcacttctctgaacacaacaggcccagtttctggcatcctgcctccctccctaatgtcactgtctggtcggaaacagggccttggctgcattctttgggcctgagctggtttcagcccaggctgggtgcctgctcggtggttcttaggcttctgcactcagtcattcattgcacagtgtctcaagtcatcgtattgattcctttagaataaaagccacctcctctttttagacctgagtgctgtgtgtcagacccctgagctgctgtcttcagggcagctgatgctgtttactgttgtccccctagaatgacaaatcacaccagaaaaattgagaaaacagcccaaatggcacagatgcaagcctgcaaaatagacacgggctggcctccgtggtgggagtgcttctgaaaagtgtaaagcaggcttcttgacctgcctcccctcctgtctctgtcaggcagcctcgactcctggaatctgtgtcctctttcctctcgcccttgcctctgccccatcttgggctccatacaattacaccaccatcccccagcttccgggcctcccagcccactccatccccaaccctgcaccagatggggactcccaaaacaggagtctccccagtcagacccgattcacccccaaaagccacctaagacccacccgatcctccatggtactttgtgagttgtctgtgttacaggttctctgtctttattttaccatcttttaagtacctgttattcattctggagaccaaggtcagagtcttatttagctttgcttttctgggccaggctcagaccaggcctttgtaagtattattgagtaaatacacagaatactgcttaaaatagaccctgctctgtcaggctctgagcctaggcttgtattacacatgtgccaaggaattcttggcacagcaggtctgtccctggaccccgcattaaatgccccccacccctactggctcagtggtaaagaatccgcctgccaatacaggagaccctcaatcaatccctggagaaggaaatgacaacccactccagtgttcttgtctgggaaaccccatggacagaggagcctggcagttcatagtccatggggtcgcagaagagtcagacatgactaagcaactaaacaacaaccaccccagatgtagtgatgtgacatgatttctgcagaaccctgacaaaatgagagtccgtaatgtgccccgaacccggtgtgaacttgccccatgacccacagctcagcttccccagtatacttgtcaccaaagggtgtgttcccaacctcttggcaacagaatatttttagcagatacacaggtcagtgccacctggcacttgctcctctttccacagacatcccttcctttctgagcctcacccagagagcaacgagtcactgcaaatgagctggtgggctcactgtggccggacctccggggggccagtgaccgccgggaaccaaccctgagcctcacttcatgggacacaggctgcccgcaaacatgggtcttctcagaggaacagtgagcacatttctggtcgcatctccctctccttttgcatgatcatacccaggctgtgtgcccctgggggaaagcatatttggctacaagatcataatacaatcagaattttgacaagactttaaaatatccaaatctggaggagagttgagaatttttagaataaaatattaacaatatatgaaaacatcaataatatacattcagaacagcctcctcagagctcaaattaggaaggtcacaccaaggtcattgagtttatccccctcattcaagagaaaaatgaagcttggtggaaagagaagtcatgggtttaaaggtcaagacaggtatctactagccacatgaccttggggaatttactttgagccacaagtttagctctgagctaaatctgcctctcctattttgcttgcctgaaactgtttttttttaaagaggagatttttaagtcttaaaatttcatagcaacatgtgaccttagttcaaattctgattctgtgaacctgctgtctgtgacctcaggcaggttactgagcctctctgtgactccattttcttatgtatataggaggatgattaaattccctgtgtcacggggctaccttgtggtttaaatgaggaaaggtatgcaaagcatttaaaatagtgttcggtaccaagtaggagctatctaagggtatgctaatattattattattttaaatctggattggtggttttcttgaaaacccggaagatctgacagcctcatacaacacttggctggaaaggtgtagccactccccctttagagagactgtgccctgccttctagctctcaacctctccctcctccttgtacctcctctgtttcactcagcgggtgtggccagctcaccgctcctccccaacacgctccctcccttctagggccctgagccccctgtttggtcaggaagcagtatttctgtttattggataaatttagaggataaacagggcttccctggtggcttagacagtgacgaatctgcctgtaatgcatatgacccaggtttgatccctgggtcaggaagattccctggagtagggaatggcaacccagtccagtattcttgcccctctgtctctgagctgccataaccactcattctcttgctccagggcctcccggcctggcttctgggtgaacagcactagtggcaggccgctcactacctcacagggcagcttcactgctgagtcttcatcttatgcagggtccaagaacaacagctcacctaccaccttgcctgagatgccatttaatttccactgcatcccctcttctggaatccagagcagagggatatgccatctcctttcagagctgtgcgctgagttcccaagtgcttgggcaaaacttcaggtttcagaaatgcctacaaaaaggctggagtcactacccaaggggtcacgtgctgaatggtcagagtcaggcagctcagcatctccagtggcaggactggaggggaagctgctgaaggcagggggtcagactgcgtcatccgtaagagcactggggtcagagctgggttccggttcctgcttcaccactttcgagctgcctttgtggctttgggcaagacacacaacctctctatttctgtttccttctctgtcagatgaaaataataagactcccgtgatgaagggattgtgcaagattctccttcttttcctttgaatccgtgagtctcagagctgcagcataagaatgaaaacagacccagaagattctggcagctccactcccctcctgggagcctcactcccctcctgacccagggcagtggaacagggaagctgcttccaggcgagggttcgggacccctggtgctgagtagtgacctcaggccctcacagccctgggcctcaggcagtcaagctcaaggtctctctaagacatttcggaatccacagaaacagctttttttttttttttttaagacaaaaccaagcattttccagactggctgacatccctggctcgtcagagcagcaaaagacaggcaggtggtggggctcagacagccgtgagtcagctgtacccaggctaggcacagatagggggccgggagggcacttcctctgcggctgaagggctgcctcagctggagggtggaggggccagcagacctgggaagcaggaccatgcccctgggcgccgcaccatgcatttctggcttccttccctggctctttgcagggcatttctctgcagctgtcaacaccctcagtcccacccagcgctggcagcctttcaggagggctgcagaagagcagtgttcttctctgtctgcagtcctacaggcccctgggcaccccagagaaggaaggtgctaaggaaaccttggtcagcatcacctaaaagcatccaggcagcgtctgtgcaggggcagggggacaaagtggaaaagtcgctggtggtgtgatcttgtccacatcacttgaactccctgggccttggttcacatttgtataaaatgggaacagtggccaagagctggtgggagggctgaatgacctcaagcctgtggcagtgactggtacacctaagggcaaagtttgactgttttcgctggaagggaagtgatttttccaaggttgctcagcacgttcacacaggagccaggactcagatccagctctcatgctgacctctccatgcacagagaggttcctaccagaaagtggggagcgttctggcagccagtccaccgtggttgggagggactggctgtgtgccgcgtccgtggggagcccacagtgtcaggctgaacttgtgctcagggactcgtgagagcatcttggctgagggtctctagcagacatgaggaaagaaggccctggcttggctcccgtctgtccagcaatgcctaccgagcacttgcagggcatcaggcactgtgctaggcccgggggatgcaccagtggatgaggcagacgtgtcccccctccatggggctaacagggaccaccctgtgagaggccacgacagtacacacagctcgacaggtgccgtgaaggaggagtgggtgggacccccaggcccacgggtgtgtgagagagggctctgaaggaagggacccattggcagagccctgaaggagacagacagactgtagcccgcggtggctggcgggggtcgggggagggagtgcagggggaggtggaagaccagaggaaagggactcagaggcacgggatgacattcggtgtggttggcggagaagtgccgtgaagggaagagctggaggggtagctggaccaggaggtgccccggggccttcagcacccgctgagtgaggggcagggctttaccagagcgcagtgggaggagcatttgagtgggcccttgggctgtgaggagcggccagatgggcggtatttggggagagtcccctctggctgtcttgtgaagacagcagggtaggagagaggatggtctgccctgtggccgcccggaggtgggcctccctggaacacatgtcgcatgtggtgttgacgggccgtggtgatggactgaccgacaagactgaaggatgtggaggcaccaaggatgctggcctggccaccaccgggtgtgcatgccatttactgacgcggggacccaggaggcagtggtacaggtggggggcatggaaacaggattctgggaacgtgggttgcaaggtgcctgaagaccaccgggaagacgccaagagggcagctggatgtacagcagagcggtcagagctggagagacaagaggagtcttcagcatccagggggaaagtcaggtgtgtgtggaggagctcacctggaggcaggtgtgaggggagaagcatgcaggttggtacccgcagggagggtgggggtgcagagaaggaacttgccgaggagacccggtcaccaagccagcaggtatctccagatggtaggcaacggggctcacagggtaaaaccactgtcactcagatttagcagcccgtgacattgacaggaacagtcagcaggggagctgggctggggtggcgaggagacgtgactgccagcaggacggccctttccagacttgggctgagaagggaagcagatggagtggtcgctggagccagctgaggtctggcgggcgggggctgctgttgcttggtaccaagaggactgagcccgcgcgcacagtggtgggatgtgtccaaaggtggaggcctgaagctgcaggggaaggggtgggatcttatagggagacccctataaggggccatccaacctccagcacagactggagggactgagcctgggctgggaaggggaggagggcccagccgacaccggacagctgccccacacctgtccctggacttggtcctttgggaaccaccaagctgcacaaccccagtactggcctttgaggagcagagaagtcagaggctccaggctggccaaccagaactgccctctccaagtcctgggagcccaggggccacccttcccctgctctccatcacctgactgcctcctcctctcacctcttttctgtggctccccaatcacattctctcctggttccttatcaggatctctctgcttgggggtggcttttggcaccatccttctacccacccttacctttgggtgcttcctgggccctctcactatcctttttctgttttcatactctcttgagtagtcacctgcctcctcacaaagctgcaagtcccatcctgagtcccatggaattctggttgtgtgtggacattccttcaattctctcatgagcatctcacattcagtagttaaggactagactccggtaccatttctctctaagccgtggctggtaccacctgaactagctaagttgaaatctttgttcctcctgcctggtgccccctgtatcatccagacagccaccaggatttgtagattctacatccagaaggcttcgaatccctgtcgtacaacacgtgtgtcttgaacccagactgtttctcctcttgcagaccgttccccatggcaccaaggaagtatcttctgttgagactttatgtttacctttaagacaactttaaccaagtctccatggcattcaaggctgatggtgatccagtctgccctgcccacaaactctccaggcatcttaacactcatgcctgtgcggctggagtccctgcctggggtcctcccttcttgcctccatctctcagcatcctctctagcctctcccaacccaaggctgtgtcccagcaggctgtgcactttccatgcagtgtgacaaagtggtgtctggggttgtgtacctgccttctcaccccaccccccaagtcacagcaccaccctcgggggatcgagcagagtcctttctctgtgtacctgtgtgtctccacttgggcacccacctgtggtttaaactcgctattgagggagaatgaaggggctgagagtagccaaggtcgacggactgtctgcctgcctccgagctgtcttatgtacagagggaagcacacatgtggtagaaattggagcatctgtaggcctgggtgggaaggggtgaaagacaggggacccataggctccatcatggttggaagtgagaggggagaggctgtcatggaacctctgagcagggcagtgtggaagtggtgtggtgtgtgcgtgcatctgagcgtgagcgctggtgaacactgtgcctctgcctgcctgctccctccctcagagacccctcctgcaggcccatcctggtgacatcctctcagctgtgagctgatggtcccagtggaacaggactgagtcccagccgctgtcacttcctcaccttcccctactccaagtcccctccctgcctctctgaagccccacccagaggctgggtgggagggagatgtacaggtgagtgtgggcataggcaggcctcctgcttggcataggaggcacactctgcaggctgagaaagccacacctctcctaaggcgcctatgccctcggaccctgggtctcacagtcagaaagctcttctcctggaattatgccaggattccctccatgggccctgccgcagccttcccatccctgccaagacactcacacgcacatctacagtgttaggccaatgtggcgttctgacaaggacggtatcgagtgagcttgtgggactcatgggttccttctaagtggaaataagagcattctgattcacggccaagagcgcagtggccctgaggcccaagcaggcaggccaggcaccccaggaggcacccgcaagctgtcggtacttcctgctaggaccccaggtgatccccggagagagacctggtggctggaatctgggtcctgagagcttcccgctcggctcaagacggaaaatactggggagagagcttcaggccccgggtgtcttgactctgaggaccgggaaataaagtgccctccgctctcccgtcacgtgcgcgtctggcgggcctgcgagcggactgtttcggtgctggtcgcccctcgtgggggatggacaggctctggggcaggcagattcagaagttctgtccctttctagctgtgggagcctcgggctctccatggaggttgtgactgaatgtgggcaggtgtccggcagagggtgagcatggctcagtggtggctgccggagctgtggctgtcatctcttttagtctctttgttgcacggtggcccagagcggctgctctttggaagcagaagctggtgctgaggctggatctgggccagagaccctctgtgcccctgtggcttccctcccggcccggagcaccagggcctgttgcctctgagggagaggagggggtgcaccccccgcacccgtctgaggtcagggcaggtgcagagctccaggcggattccccacccctggctgtctctgctccgcgtccccctctccccccgcccctaagagctggatgtggccaggaagcgcgtgcatcttctgaggtgggaacctgcctcctctcctcctgttttgttcctttaccatgacgcctgttgctcataggtacaaatcaaacgaagagtatgtatatgtgcgaggccgcggccgagggaaatatgtttgtgaggagtgtggaattcgctgcaagaagcccagcatgctgaagaaacacatccgcacccacactgacgtccggccctatgtgtgcaagcactgtcactttgcttttaaaaccaaaggtaagagacggtcagcggagcgctggccctgcccgctgcagggagctcccctctgggagctccagcacagagcccgaggcctggacctctctgcctggggcctgagcagccctgatttccgggctccccagttacagagcagcccactgcagacggggcagtggcaccgtcggctgcccagcctgtcctcttagatctcacactggccccgtccaccctccacctatgcgattcccaccacggccaggcagtggcactccagcgcacagctcctggttttgtatttgatctcatcaccctgcttccttttgcatgtctccttagccctttatccaccgacctgatgagttccagcatccacactggtcactgccactcttgagtttggaaatccattccaccctgagccacttaacacacttgcatggtcacttctcatgccagactttgcctccacctcgcctcaccactcagactgtgttcccgctccacccagcttctccacagccctcagcactgggcccggctctcccctcaccttgactggcagccctgtcattctgccctggccacgcagcacctcagggtcagctcaggctctggcagtcacctgtgagaagaaggcagactggccagtgagggtatgaatccagagggctgtgttggatgatgagggcagccatggctgctgcagccacccaggacccaggcgtgaaccagtgaggctgagtctgcgaggcttggacagagtgtttctctatcctcccacgggctgctcctacagggcaggaaaggcatcgtgacccacttcttctttcctggtagccgagtagaccaaggtgcctcagagggaggcctgggctctcagtaaccctggtggcttcagcctcttgtgtttggcagattcctggctcaggatttgggcacgagggtcctgccttccccttcgggcaagttgggggcctccacaacagccccctccagggccacgtggcttttcagtggatgcaacttgagagcaggttcggctttggtgcccattagccttccttttgtgggtatagctgctcccagagagagaggctgggtggctttgaggaggcccctccggactttgagtcttccttcttcctcctcctgatcccttccattctgtcagtgctaggttgggggtcagtttatctcacccccttgctcacggccccctctctgactgggtgctcatctctgatctgctgaccccattagcctgtcctcctctgtcctcggcgccatcattcccaaatggaactcgaacttttccgccaaggttttggttcgaatacaggcgaccatcctccttccttgccctgaccctcttctttcttggtgtctcatcaacaacagtccagagggcccagagaggaccgactggcctgcagcccagccatgtgcaggacagctcgcctagcaggcctaggtcctagtcgtgggctccgtgccccacacacccccttcagccccacttcctctggccttagggggccagttgggactttctggaggagagaggtggagattcaacaattggatagccattgaccaacaattcagataatggtctttgactctgaatgccaaaagctgtttgtccaagccccaccatgaagggaaagaaaatgagtccccccgcccctgcccaagccagaaatgactgttaaagctggagctgtaactatcagctaggacccctgcctctggggcataacccccaccaccttcctctcttccccttgtctggacggactggcaaaatcaggtggcctccagagtggatcactgctggcccaactcccaggctgtccagcggaccacaccattctgttctcagcgtgacgagcccagtcctgagagtgccccctccaccgcacccccacccccacccagcccagggccacacagagctgcctaccatctcggggagccatcatcctctatgtgagactggaaagatccattgagccaagtccccagccagagcagtctcccagagcaatctctattcaattctctctggctttattgagagcaaaggcctggtctttttctgccaagtctgaaagaggtctgggtccctggcaagaacaccccttttccaggagattcctgcattggaagccacatagctgagctatctgcagtcccttcctgggtccccctgagccctggagggtccagagcacacaacctgcatggaatgtcagtgggccctctgagtgcccagggggcggagcctgggatgaaacctgggggtggagccctgaaggccccgcccaggaggatttcctctcaccctgtgatggggcatgtgctgagctctctgccaaggctcctagacccttctgaaagacaaaaaccttccagagccagagcagtgagtgcatctgagatagtggaatctcaaactctgggaggtagaaaggggctagtatgggcggtgacagatggaagcagagccagctcactttggctctctctgcatgaggcaggagagtgagggaagccatgagacactgaagctcccttgactcctcagacccttcagccatcagcccagataccaaaggagctaccctcctctcagggctcctgcctccgtccagctgcctccgtctcctccctccccttgtccttgggctcagactcgccaggctgcatgagaaatgaagctgggcccggtggtcttcagggccctccgtcgccactacctggctgcaccggctagagagccttcctgtccgtctctgtccgcctgtctgtgtctccgtctctgtgtcagacgttgtgacagcagctccggtcctgggtgctagcaccggcttgtctcagtgagtgaggccggggaaggcccactgggatgtccctatggaggtctggggtcctgtgtcctcttctgagaaggttccccgaggccagcagaagggctgtggtgggtacaggcccttgcgccgatcgcctgcggacagagctggcagtttggagcagccctcaggggctgagggagggtggttggtcaaagcccaaagccgaatggggtagacacggttttcagcttatgctcttggtagaggatccacctgtgttccagatgcccatcatttccatccgcttgcctttcctccttcattccaggatggtcagatttggggtgagggggctgggatgatgtgaaaagctgtgaactctgcttggaaagctgaggctctgacccttgacaaggaaatggtgtccaggccaaaaaaagacacctgcagccatttggttcacctccttcaattcacagaggagcaggcaggcatacagaggggacactcagggagggtgctgggtaacactcagggctgcacatccgcccctatgtccccatggcctatcccagcagccactcagactcccagctcctccctgcagcctccggggcaggggcagaggagaagctggtgtccaggggctgcctggtgccctctcctgggattgctgagcccagacagactggtggaggcatttacatctcagccatcatctcagcatctctctctcctccacaaccagtgcgtggctgtggcagagtctcccgggtgctccatgaacactgactgttggggcaggggggacacacagaatgggaaggagggaggttccacgcagtggcatctgctctctgccaggcacgctctgctgccactctacatgcgtttgttcgtccgcttctcccagcatccccatgaggtaggtacaactttacagttgcagaaactggggctcaaaaggttaagacacttgcccaagaacacatagctagcaagcgacagagcccagactcagacccaaggccaccaagctcctacatgtcttggtctgtcccaccagtatggagcacgcaaggcacctgcagtcctgagacctggctccagacggggctctgcgctagctggcaacgtggctttggctgtttggttctccgtgatggtgaacaggagctgtcccagagcatcccgtcacctcagacagtggattatctcgtccagtggcatcattagcaccaaggccaggagtcagaacagaagcaggaagaccctgggcctggtagggggtgggtcacatggtctgggaggttcctcccgacactttacttctgtgatgagaagaacatttcccactcacggttattacgcgcccttagtgtgctcagcacctaacttggttgagtaagagacccaacccttccggacagaacagggccaacaataatgtcatagccaaaatgagcagtgtgcatagtcccctggggtctggggtattcaggggatggcaggctggtctcagaacctcaggggacgtttggtctctctggcctatgtaacactgcagctgccttgaccgccccctgacatcctgctcaggctttgcctactcacaacagtggggccagaggcccatgatgttggacagggacgttgggggtcccccagccctgggatgactctggaagttatggctgtgctccccatttggccaggagtagaagatccagttttctgtccagttaaaggaagaaaatctgagggagagatggagtcacagaccaggatgagcaggagggaaggggcaggaaacagctcctctccatcactgctgcccttgacctgcacacctcaggcagcctcagcttaaggctcctgttacctctgagcaaaaccttaaggttccttaaaattctcagaataattaagaaaaaccctttggttcatgcatgggtgctctctccctagtcacccacccatcctcccgttgatccatgtctcccatcctcgcatcctaagagcttgtcttcctctcgtcttcccatcttcccctctcgtctgcctctccgcctctctcctttgtcctcccaccatccacccttccatcctgcccgtcctttcatccccctctatgtctgccttccctattgggtgtgctgcctccatccccccatccaaccagccctctcccccttgcccagatctccttctctccctttctccatcttctcatctgtttagggatctactccccatctacccttctatttatttttatcctccatctgtctgtgcatctgcttatctgctcatcgagtatcccacccgtctgtctggattctccctcttcatcctgtttgtcactccatatttcctcttacccacttattcatccatccatctatctgtccaccaatcgttctatgcatctgttcctggaatcccttcttctcttttccatccatctgttcaaacctggtaataagatgagtgagacagagttcctgactcaagggccttgtgatgtattatatgaaggaccatggaaatatagccatccctagagcaacagtgagcacatcacagttggaggcgattggtgagcccaaaggaacatcgtgaggcatctggccagcatcctgaggcgagctggggctctcctgctggtccttcgcagagcgctcctgcccatagggctttgtgacctgtgaagcgctgtgcacacgtcaggaagaatcggtgtcacagagtttcccctgattccacagagcttctggctctgctcttcagcccactacggacagagtcagccaccccccgagggctttgtagtcacggggaggacggagcctttgctcagccttccctgtgcccaccacccttggccatgtctgcatggcagtgactttggaggcccaggaaggggacatgactctctaaggaagtcaggacttggaccccagccttgtggcccctaggtccctgtctagcagacttcgctatgccgtctgccctttctccatgtctattaatagcagtaactttgtcctggttcctcctcccaaaccctaagatccctccctgtgggctggcctagcagtatcctcagccagaaggacatcctcagcacccactcccatgctagttcatgggctgggtccctgctctcatcccagcatttgaaatggtcagtaatcctgtcaccagctcctgggcccagggttaaatcagaaaaacttttgcatatgacttgtcttttaatctccttttgtttttttaaccagcatctcacttcctcattataccctctgtccgctcacagcccctcacccaccctacccggctcctctgtacatcgtgcacggcggccgtggctgcacccctgacctgagcacgcgggcagagtgatgtcnnnnnnnnnnnnnnnnnnnnnnnnnnnnnnnnnnnnnnnnnnnnnnnnnntccctcctccccctcccccctgcccaccttcccctccctcccctggcccccttgcccgccctccccctcctttctgtcctccttgcctctgctccccctccccttctccttcctcaccctcttcctcaccctcttctccagtcttcccaaatacaaagagacaaaggctaagttcacggaacgatggcacccacgcccctccttcttacagcacgcgcctggagccagagcacttgagcattgctgactgtcacgcaggtagagcacccggcacccggtgggtgctcagtgaatgtatggtggttacattaatacacgagtattatagtcaacatcgattgagcatccacctgtcaggcatactctagacacgtgccgtggttatcttggcaaaccctcacaatgacgcagtgaggtacatacttttatatgctccacacccacactcacacctccacactctggacatgggcttggtgctcaggtcttttagagctaggggctttcaagagacccaaagccaggcagacctgacagccccctatcacctctcaatcccaccccacgtcccagcaccacaccccagcctcagtcccccagtagcaagagtagagccatattagggccagtttctgtgaacacaaggcagagtggaaggtgagtccaagtcagcatgtctggccgggccctgtcgggcctcagcatccaagaaggaggccagagcagctcttgggggtagataagcaaccagagatattcttctgcagtgagcaaacctttggccagatcccctaaaatcagggtcaagagagtgtgaaaaagcgaggtgtgtgttcctgtgtcttgtttctttctgtttatctgatttgggaatgtatgtgcagtcttaaaaacaagttagatcatatttccttttaggtgaaatgaatcagctttattgaacagaatacactgaactcagagctgtggcctccaaaatgagaatgtggggttactgagttgatcaagaaagcacgtcaagccatttacagatgtcttattaagtcctcataactgtggtagaaactggtgtcactcctttttaaactgaagacatttattaaagctcaaacaggttatggaagttgtctgaggtcaggcaaaaaccactccatgtggctccatgccactccagtgcctggggggctggacaggggagctgcacccaagcccagagccctgcctgggtgggaggcagggtgtgttcactagcaccgcaccaggggtccactgggcaagttcagcttcattttcccagtgaggccgaaaatgatgaccagatgaccttgtttgagaatgcctgaaatcagtgcagtcgttctagaaataattcctgccagcaccagccctattctaagtcctactctaggtactagaggttcttcaatgcatgaaatatagttcctgtcctcaggaagcctgcattctagaggggagccgggtagtgaacaaatgtggaatagggcaagggccttgagtatgaaataaagcatccatgacaggtagggaagtgtggggagtggcctctctgtttaggtgatgtgagccgcgaacatgaggcagggggtcaggaagccacgtggagcctggggaagggctctctctgcaggtggaacagcgggtgcagagcccctgaggacaagagttgggaagtcagagacagctgcggctgtgaaggtcaagggatgggtttagccgcctgctggagcgactgccctgactctgtacgcagaggatggccggtagggggcgcggctggaggcagtgatgcaggctgagcacgtgttggactggggggggcggagggaggtgaagaaacgtgctgttaggttttgctgacacatcagggcgggggcaggtggagggtgaacgcatgagaataaaagatccaaggatggtttccgaggtttatggcctaggaaactggaaggatggagttgccatttcccgtgatgatgaagattcagggaggagcttgtctgttagacgcgaagtggttgggaggtggccaggccggcgccgcagccccgcccctgagggtgaggaggttgagcaccagcgccaccgtgtggccagacctccccagcgccccggcgcgcttcgttccacccgtcccttggctccagagaggcgggactttgtggagattgacagtgaggggtattaggaattattgatcggcaggggcctcccgtagagctctgcaagagcccagatgtggggggcctggcgaaccttgtgctgggcacgggaatcttggattccgtcactcctgagttgggtgcctagggcagggcaccagccctctgtccctcagcgtcttcatctgttacagactttaggatctttcctgccgaatatcaggagccgctgatcctgactccctgactggtagcactacccctctgaccttcaactgcagcatgagatgctggccgtgctgcctgtgtgttgaggttgtggggtacttggggtgagaagagctgaggtttattgggtacttactaggtgtcagaccctcacaatcctctcagcagcttcatgaggtggcttttattattcttacccccacccccaccattttacagacaaggaaactgaacccagagagaaaaagtaaattattcgacattgcacagtaaggaaggggtgggactgagattcaaacccagaccatttcctgcttctcagtgcataaaaacatttttaaactggcagtgtaatgatgtaggggttataaaccttagtcctgactcagccattactttctgggtgaccttggggaaacatttgcctgctctgggcatgggtttccccacaggttgatgagaggtgaggctaggtgaactcctggagctaaagtcttagggcaaagctttagggtatgttttgcctccccctcacgacccctgctctgtggtccccagccccttccgcctctctggtcattctgctcccagctgccaggaggtcatgcccttggcctcccttcacctgacagctccaccccgcagttttttatctacatcctcttgcatgcccgactgtcatccatttgctgagtgctgagctgtttgaaagcacaaatgctgggctttctggtcccggtgcagcttggcatagtggggtccagagaagcatggttgtaccagtgacctgagtcagctcatgtgtccagctctcttagttagtagttgagtggatgctgacatgagcgtagtgttgggccagcaggacccaaaccctcaggatcctgccaggtgggcgagatgttagcggagctctccccagagtcctgattgctgccaacttcagagatgcccaaactaggtctgtgtcctgttagagctgaccccgctggtggggctgccccagcagaagtcagaccaggaggctggtatttcagagctctactctcctccccagctgggagcaccaggggttctacaagcaccttctctggacatgagtggctgggaagaggccctctccgcaggctgaggtcagcttagccaaaccttccaagggaacagggcctgccacctgccagatgctattgtgccaggcatcagcagcgtggccacagtggcaggtgtgtatgtgaactgaccgtgcccagtgctgctggccccgccagcatggctgctgtattccagaataatagatgtctccatgaatgcgctgagtggctacagttattaatatttgagcccttgatatgtgccaggcttgtgtttcctcctcctagcaaaccttatgagatgagactgtcatattcatttgacaaagatggagacagaggcccagcagagtgacttaacttgctcttggtgaagccaggactgaatactaaccaaaaagaaaaagaaagggaaggcctgtcttgtttgctgtggtttgatgccagccttactacttactttgcctgggcaaggtaaggtgaactgtctcatcttagttccctgtctgtaacatgaagataggaatagtgcctaccgggcaggattatttgtggattaggtgaattaacgcacatgcaggccctagagctgaaccttaacatggtagatacgaagtcatttttgctgtttacaaagtgctcccataccctcaacgatcttggccgtcaggcggggtttgtggcacagagcagcgtggggtgcggctgtaacctcgggcctcctgtgtctgtccctcaggaaccagtgatgacccattccaggactcggaagggcgagagggcgcagaggccgtggcagagcaccagttttcagacctggacgactcggactcggactcggacctggacgaagacgaggatgaggacgaggaggagagccaggacgagccatcaggcccgtcctcggaggcgcccccacctggcccgccagccacgctgcccgcagactcctcacccgttcagggccctcagcccacagaggccacccggggcagctcggtctcagaagccgagcgctcggcacccagcagctgctccacatccagccaaagcatcctgtgcctcccccggctggcaccggccccccggggcccagtggagaaggacacaggctcggccctgagctcccaggccctgtccccaaggaggccgtggtccccaagcaaagaagcaggcagccacctaccactcaccccaaaacactcactaaccaaaagctactcgtctccccagcgacattcaccggcccgagagccactggcctcagccccgagtccgcctggctcccagacgggccctctcccctgcgggtccccgagactcgagctgtcgcctcttgccctccaccccctgggaagggaactgccacttcgagcgcgcctgccccccgaacgcaagggcgctgcagacccaggcccccccagacactcgcccaccaggagatggtctccaggccaggccgagtcaccaccacggtcagcgctgccagggaagtgggccttggcagggccgggcagccccttggcggccgagcgtggcccaggctcagggctggccccccgggctctctacccgcccgcgcctctacctcacaagcttctcggcagaagcccagcggagacctgcacctccacatgggtgagttcctgtcccccaagtggctgatgggtggggggccgcgagctcacacctccctgagcgtcacacccagagctggacccctgccagttcagcggttaccaataaggcgtgcattgggcaccacttacacaggcactgtgctgggtgcctgaaaccagtcagctgtgtgtcagaagcagcggagcatggactgtggagctggactaaaagaaagtgaaagtggaagtgttagttgcacagtcatgtccaactctatggactgtagccggccagactcctctgtccatggaattcttcaggcaaaaatactgaaatgggttgccatgcccttctccagaggatcttcccatccctgggatcgaatccaggtcttcagcatcacaggcagattctttaccatctgagccaccagggactacctgatagtttttaaattctggactacccagaattaaatccgggttctgtcacttacgagccgtgtggctttagatgtggtataaacactcatgccatctcctcccaccccatttccacgtattctttgagcagatggcagagcccaacccaaatctccacatctccaacatgactgccaccagcaccctccgagtcacttgagccagctccttcccatcttcccatcagcaccgtcactgtcacatcatcagtgccatctgccatcagtacactccagccaccccataggcttgatcaccgtggtcacaacatcactgccaccaccacggtcacgatccccagcactgacacgttatcatcatcggcttacttttcctctcccaacaccttttctgtcactggagtgtcacgacccaacatctctgctcaccgccagcagtgtcagcaccatcactcaagcgattcaagctccaggagtagtaccatccaggaatcttaacttggtttttaatttggggctcaagttaaaattcctggtggtgaaaaagtgaaagtcgctcagttgtatccgactctttgtgactccatggactgtgtagaattctccaggccagaatactggagtgggtagcctttcccttcaggggatcttcccgacccagggatcgaacccaggtctcccgcattgcaggcggattcttggtggtgggaggaggttaagagcctggggtgggaactcatgttcaagggtaaagttgggtcagtattgtctgaggaacaagagaggcagcagaagcaagagagagggccagcgcacagaagccaacagaaggggcagctccattctctgaaaacgaacgcgctggccagaagcgtggggaccttggttcctgagtgtgcctatggccactatagggctggagatggcccattccagagagggcacccacccagggtgccaccgttggcaagggttgggactcaatggtggcccagctcagctaggacctgctctgtgatctcgccaagccccctcctcactctagtcctcagggtctccaggtgcccagcaggtaaccctcgccttcctctgtcttcttttctgaccctagcagaaggccgagtcgccaagtccgtcctgttcacctgctcccgctcatcctctcttctcccgacccttctcggccccccatgacttccacggccacagcccggcccggacggagaacatcttcagccacctgcctctgcactcccagcgcttgacccgcgccccgtgccccctgattcccatcggcggaatccagatggtgcaggcccggccgggggcccaccctatcctgctccccgggcccagcgcggcctgggtcagcggtttctcggggggcggaagcgacctgacagggtcccgggaggcccaggagcgaggccgctggagccccaccgagagctcgtcagcctccgtgtcccccgtggccaaggtctccaaattcacactctcctcggagctggaggccagggactaccccacggagagggggaggacgagagggggcctgggcagacctcccgactgggagccccgtgcggcccaagtgcccacagagcccacgccgacgcacagcccccgcacccccccagagacctcaccccgggcacccccaggccaccgggcagagtcccggagcccccacctggagtcaccgcgggtgccggccaaccctgcggcctccgccaccccgccgctggaccgcagcagttccgtgggctgcctggccgagaccgctgctcgcttcccagcccggaggaggaacctctctggggaacccaggaccagtcagggctccccccagccctcgggaagtggggggtccgggacacctccacaccagcccgaggagcgggggccccggagcacttagcctctccctgaccacttcagcatctggtttctggtgtttggcaacagacgtttccagccgacttcctcgagtcatcttgctgtcacgggctccctgtcccatctgttgatctttccaagcagcttctgctcagcccccatctgtcttatcttcccacctcgtatgcagttacctgtgcctttttctatgaccttttgttgcttgaaaagaaacaacacacacacagacataaaaaaaaaaaatcccacgaggagactgaggctgtgaatatttagatgggacctcaccctgggccactgcgatcagcagccccccacaaagctggcaagaggcagtcagttgctgaaagaaaggggatgcactgagggagagacagagaaaaaaaaagaaacttttaaaaatatataagtaaatgtaaaagcaagcactcctatgtacagagtttatggttcctatttattgctgcttcatcccaccccagctagtggcctcccctggctgctagcagaagggtcagcggcccaaggcagagggacaggctgggagactccatgggcaggcccagaaaactccaactttccttttccaaagataaggtaaattttcctaggatttcaacacaaactgtttggagcaggtagaaggtagttgctggttgggtccccagggctcgcagacaccctggtggtctgactcgtgaccccattctggcatttgactcatagacaaatccccccaccccggcacctctactctgcactctgccctcaacctttggactggggaaggagccctgaccacccatctcccggttcctgagcacctgacctcggccttgctctcagggccccagccattgctgcgcctttgttctagtaactacccacaaggctgaagggacaaggcctaacccctgggggtcaagatccaaggtgcattgccttgccattcccaaggccaggcttgggcttcatttcacatttggtccctggggtacaaagggctctatttcctccatgactgggcttttccggtacttagcactggaagtttccaaggactcatttctggacctctttgcagcaggaccagtcctcctattggcgtgtcacacactgtcaggcctctactatccccaggaagtacccagaaccatgactggtgggaactgcccaggcctcctattggttggcttaaatctcttttaaaaaataaaattatatatgtgtatatatacatatatatacatacatatatatatatatatatatatatatatatatatatatatatatatatatagaaagagaatggtgtttgatatttcccctagcctcctattgtccgaggtcatttcaattcttctccaaagcaatcaagaataactagtgcctcatttctcatccccatctcctcctttaagaagctgccctgtgttttctggggcaaaagcctgctttgtaaaaaataataataaatagtaataacatgactagaaattaaaatcccaagttgaaatatagaacttgaactctagcatgtttacccagccctgggatatgtggggttttccccaacctccagaaattcttttcttttgtctctaccagggggagaaagcacaaggaccgtggtcacagcccagccaggctaggtgctaatgccgcagagcagggacctccttggccggtcctcattcctcagccaggctgtatgaatcctgtggccagagggggctcctgggctgttgaagttgcttagacaggacaccataaggtgcagagggctacaccatgcagaggcacctctgtgggctcctacccttgggcgtaattccctcttccaccagttcaggacttttccttccttggactctgctgccaggacaaactagccaggccacctggttcatttccctctggctaagacaaaaaggggacaatagggatgggcttccctgggagggggtggctgggccccagggtgctgaggctagggttaaccagcacttcctggctgcctgacccagggtctgaagctcttggtccccctggaagaaggctaacaagcccagccttggctatgctggcacttgtgggtcctggcagaaagctggaaggagccccggaccccagtcacagccttggccagaggctgggtttttcctcacccttgctttccaaccttaccccagggcaaaggtgagggacatgggaaggtggctgcctaaggactggagacttcaagggccgaggcctgggagctgaataaagggcattgcttcagcccaggcttgaaatcttcctgggcaagatcttccagctcccaacctacagagcagcaaacagggggctctgctagagtagcccctgaccttgggggtagccaggcccctcctccaagccctgccccacagctctccccggggcatcattcctctggtactcagacagcccaactactaaggtttccttcctggagccctagtcatggctggtggtggtcagcaggggagagtcaggcacaggcagaggggatgggggccaggagtcaccagagacccatttctcaatgacagacacaatgtgcaagcaatctggccaaaaggttgttgccctgcacaggcatccagagaaatggacttgatgccacccgcctgggctgtatgtcactgggcatggctctcaccctctctgcctcactcaactcctgctcccccaaacacagagctcccagcccgcacgcacacctgcatgataagggaaagactctcacatcacaccctcctcctgccctgctcccagccactttcacatttccagcctgcctgtgacactgttgtccctgttaagggacacagtggagaaagcagtgcccattgttggcacagacacctgtgcctgttctgctgaaatgtgcaggacagtcattcctgggtacaggctggctctggtcctcgggtgttggcagccttgcgggctggagaccaacttgctggggtttcagagccagctcttgtcatggggattccaagccagccggcccccagttctaccctccaggatgcccttcaccctcaggacaagctcagggtcattctgggcactaacctgttcctctccaaggcaccttttacaagcctacttcccctgccccaccacccaccaaggccccgactactaagaccctccaggaagtcaacagcagcgaactgcccactctcccacctccatcacctccaacttccagacccagcagtcccttcacctctctctgtgttaacaagtctgaaagatttaatttctgggtccaggtagcccctgctccatcctcacccaacccttttgaataagaataatcaagataactaagctgaattgctttctagtcctttctccagacaaaacctcttcaaaataaaagtcctgcctggacagtcgtccttggagacagatctgcagcactgaccaaggggagaaagttcccaaagacctgttccaccaattctgctcctgagtcgtgaatcctgtctgctttccatcagaaaactgcttcggcacttatgatcactttactaagcctagtgttaaaaaaggaagagaaaagaaacagaaaaaagaaatgtataggcaaatgtaagataacacgctctctgtaagatagaaatttgccttttttttttttttccctaaaaggtgtatgtattctgtatgtgaaattgtctgtagagagtttctatgttcttaaatggcaatacattccaaaaatcgtactgtagatatgtacagcaaccacactgggatggggtagttttgcctgtaactttatttaaactccagtttctctacttgcatcttgcaatgtcggtatggtatatatatcagtgcaaaaggaaaaaacaaaaactcccacaggtctaaagcacagagtctgatgtacaaaaagaaaatactgctcagtattgatgtgtgacctttgttgtaaattacatctgtactgtgaatgagaagtttttacaagtataataattgcctttattatagctctggctgagtgttcagcctgaggatattttttaaaaaaaaaacagcacgttggaataaatttgaaaatcccaacagaggcctgcttgcccggctcatgatttttcttagggctgtagaatgtcagagctggaaggacactccgagtcccaagtgctttttctgctacagagaaatcagggccagggaaggcgagtggccaggccatagtcacatagcctgggattccaagggcccggcccttccaggcttggcaggaggcacgggtacatggccatgtggtttggggtctgtattcatttcctagggctgctggatcaaatgaacaaactaaatggcttaaaacagcagaaatgtgttctctcacatttctggaggccagaggtctgaaaccaaggttcctggggaggctctgagggaggatctgggccagacctctgtcctcacttctgggggctgcaggccatccttggcctttggtttgtcatcacagcactctcgtctctgcctctgccttcgttctcgctgccttctctgtgtgctgtctaagggtcctcatcactggacttggggaacacgctcattcaatatgatctcatctctagatctttaactgaagtatatctgcgaacactccttttctgaaggaggtcacacttacatgttccagggtttaggacatggacttacctttgaggggccaccactgagcccctcaaggtaagacctggaatctgatcgtgacagttattcactgcctgtgtgacactgcgcaagttacacaacctctctgggcttctgtttcctgttctgtgaagtggagggtttcctgtgaggattaaatgagagagtatatgtgctaagtgctaaatcacttcagtcgtttccgacttggcgacactgtggactgtatagctcaccaggctccaccatccatggggatcccccaggcaagaatactggagtgggttgctatgccgtcctccaggggatctttctgacccagggatcaaacctgcggctcttatgtctctggcattggcaggcaggttctttaccactagcaccacctgggaagcatgcatacagcatggttaacagaaccttgaatatggtacggcgtcaacaagtgtcctctgagcagacctcacacagggtgctgtggttacaaggatgaaaaagtcaggtataggtccccaccttttgtatgcaacaatgacttgctctgcaccaggcagggactaatcatcagatacaacagtgagcaaatcagacagccctgccttcagagaactttcattctaatgggagaggccgtccttaagcaaataacgacatcatcaattcctcagtcccagtggccgtagttgttgctacaggagagaacaaagctctcacacagagtaagtcctaaaactcctgtgggctctggagcctgggtgggttgtggggagggctgcaggtggaggtggagtggaggggaagccatgataggagcagacagaagaagaggtacgtggacaaatcaagagaggccttcggggtaaaatgctggacacaagtttagcactaagaacctaagagggcctgcttgtttcagcggcaggaggatcattgctgacttggggaaaagccggcctgttccagcgcccagtctgcaggcccttcgtaaacactgccagtgctgaatggattgtggaggcagggggtggaggctggagagtgaggagaagagggaagtggggacggcagacccagacatcctccccaggacctgaggggagggcaggggagagctgggcagcagctggagggcagcaaggcgtccagggaagaacggagatgggaatgaggtggtgagaccccagcctgcttcattaggaggagatgtaagtaccagatgcagaaatttcccccagtgtgacccaagggaagaggtgcaagtgataacagtgaccggaagttgagaacatttccgccacggaattttctctgtcacctgctgagaagggaagaggaagctccagtatggggtagggggtgcggagcgggggtggtgtggactaaagacttgagaaagaaaaggttggaaattgtctttgttcattattccagaggcaggacagttgtggatgaaggcagtgtggaccacacaggcgtgggtgctgggcacaagagatgaaaaggctgggaagcgagtatccatggtgccagtgacctgaatgttcatctctgctgaccacagggctggactggaaacccaggctgtgagctaggcttcataatccaggatatgggctgtcacgctgcagaaacaagcaagccagaaactccagaactgaaaacaatgaaagttgaactttcccctctgccatctgtcccatgtgggtcagcagctgaagtgtactcatcctcatcatttggagacctaggctgctggacgctttatcccgtgttcctgtgacctcagaggcagaagaaaggagagagctgtgaaatgttgcattgacagctaaatgctctacatgggaaaagacatctctcctttcaaatttcacctgccaaagcagatcatattgctgtgcctagtgacagagatgaggaatatgtgtgacagtcacacaaggatacgacttcccagtgtcagaaacacccaagggctgagcagatgtcaatgatgggatgggggcagggacagggcctcatggcatcggcctcaaaggtgctgggtttttacagggagtgaaaaaaataatggtgtgcaaggaggcctggaagaaaatggcccctggcattttgatcatggggtgtggaaggcaaggagcagctgtctgggagcgagtccttggggagatcctgaatttcagtcgagaccagtgggaaagtggaatcccaaaaaggcccaggagaagaagagcacagaatggagccaagtccggcctccagcattttacaagccctatttatagtccttgggcttccttggtggctcagtgaaggaagccacctgccaaggcaggagagataggttcaattcctgggtcgggaagaacacttggaataggaaatggcaacccactccagtattcttgcctaggaaatcccatggccagaggagcctggagggctacagtccatggggtctcgaaagagtcagacatgactgactaaaaacaacaatgtatagttcccaacgacaacccagggagatgagacttacggtccccatttttagagaagaaagtggaagttccaaagagcccccaccaaggacttcctgctaagactctgtgctcccaatgcaaggggtttcagatttgacccctgttcagggaactagatctcacacgccccagctgagagtctccacgccacaacgaaagattccacatgtcataactaaagatccgacaagctgcaaagaagatccaggatcctgagcagatcctggaaagatccactttccaagttacaacaaagactcggtgcagccaaatgaatacaaataaagaaagaaagaaatattaaaaacaaaaggacccccaccagccaaagatgcagggctggttagaggctgtgtgagactgactctagcctgactctggtgcagcgcctctgggagccccaagttcctccctctcatctcctccctgtgctctggccccaggggagccctggatctcagactcttcacctccttctccccaggaacccaggggaagaggcaggcccaggccaaggcttcttcccagcagctgcctggcttctcgcagccatccaggatagccccgtgtgtccccgtgtctgaggctgaaggcgcagggatggaccatcagactcaggggctgggattccagtgctcgagagcatgccaagtgcatgcaaactctctgaagaacctgactccccagcctgctgctggcacccaggcccacctgtcactcacaccaagcctcccatggcctctcgtattcacgaggcaatttcccttttggagtgagggagatagggcacctacttccacttcacagaagaatagatcccaagattgcaccctggcaagtggcagggccaccgacccgggtcacacctgacccagaacctcaggaaggcttgggctgagccttgccactgcccatcagggctgggccttctccctaggcctagaccctctctgggcttaagacctagagaccatgcttactcctagagattcccagggacaaaccacggctggcaggatggcctcagaaggcaggccagcctgagatgggcatgagcagggagaaacaggaagcaaaaagagtcaaataaggatgggggcgactgaggagggagcagcccagggctgccctgcgtgggactcatcactgccatctggcccggggagagacttatcacctcgtcactttgtagaggaggaaggctggggcttggacaggtgatgctgctcataaggccacagtggtcaggggcagagcagagacttaaaaccaggcccacacattcagggagtggttgggactatggaaagggaatctgggcctcttggctacctcttagtcctgaaatctgggttgggggaccccagcagacatatcctttaattccatccagcctcagccactttacagagacccagctaccaacctcccccttttataaatgagaaagttgatgtccagagccgggaagagcttggcccaaggccagagctaggattcccgaaccctcagcagagccacctggaccactccgcccacccctccttaccccaggcccaggttcacctgcccagatctgcctttttaggaaaggaaaggagcagccctggtgggggcaggcgggtgggcaggcagccacgctaatccactagctcccggaggctctggttaccgtggtttggggcccgggcaaccctggctgggagtgccagcccagccaatcggtgctgccgctgagctactctgccagagccatacaaggctttgctgcagccctatcttgagccaccacaggacagccccagcgtcggcagccgccccgcccgggagcctgccagcccggcacgtcctcggactctgcctaatccaacctggaagcaggcagggctgcagcgcacgtgcaccgggcccagggttccccaaggccaggaaggtggcactgccagggcagaggccagaatcggggcaaagacctagccgggcatcggagatcctggctggggtcagggatgagctcaggtctggtccaggctgagctgtatctctctgtaagatgctcttctgttcccatcacccctttggcctgactgactgcttatccttccccattcaccgtggagacggggctcagcacagtgagtatctggtcccttctgaggtcttctcagggtccaagtcccaactactctaacccatccagggtctgaggctgcatgcacctctcagaattggggcgtccatttctaagtgcacgttgtgagcatcaggcacatacagccccccctgtggtctttgggggtccactgtcactgccatggatctgggccttggctgtggaagcaggtggggaccggtgacccctgcccagtggagcccatcccatctgtcagtgcataacacctgagtgttatgaattcacaggacccccgaggagtggaaactattggccctgtttggcaagcaaggaaatcaagtcacagagaagttatttgtctgaaactggagtgtcaggattcagccccagagtggtctgactctagatctctagaaatttccgatcctggagggaccaggggctgccatttacactgaagtgtgaatggaggcgagaaagtcattgtctgagataagaggaccctttctttaaaatatgtatctttttattctttcgttgtttttggctgtgttgggtctccgttgctgtgcacaggattcctctggttgtgacgactggggctactcttggttgtggtgcatgggcttctaacagcggcggcttctcttgcggagcacaggctctagagcgcacgagtctcagtagctgtggtgcacgggcccagttgccctgcagcatatagaatcttcctggaccagggattgaacccgtgccccctgcactggcaggcagattgccaaccgctggactatcagggaagtccaagggtgccctttgttcctgaattgggtagggccaggcccccagtgcacggccattgcccaggccctggtcaggttgcccacgcatgcagcggcccctgcagagcgtcccaggccaccactgtcaattagatttgtcacggaagttcactgggttccaacatccttgtgtgtcctacgtgggccaagttgagctcaaagccaagactgcggtactccccagggccacccggcaggtgagagaaacgtgccgacctggggggtggcaggccaggctggcattaggctctgtttgctcacccaagaaaggaagagataaatatagacacaggattactcagacacagcctgggaaaaccggctccgaacctcgacttcagccctggcccggtctcaccttcacccgcctgccccctcggtgtctgctgccaggcctgccccacctgttcccaggacgccccacctgcaaacttcaggacagccgttcctgcctgccttctgggggcaggacagaaactgaggcccagagagagcagggcacccgcctcacatcccacagcaggttaggagctggtgacgcgagggctgcactgcgggagtcagtttatcaggtccaggcaatgcaccagcccagattcggtttccatatttgtgagatggggacctggtacccccggccctcaacgccctggagcctgcgtgtagggtagagttggagaccacgcagcagaaaggggatgaagctggaggctcaagcacaggaaatgctggcccaagccgcatgtgtagggcttcagcactgggactctggagccaaatggcctgggcttaatatccccctccaccattttcagccaagagatttggggcaagtttcttaacatggtgccacaatttcctcatctctaatataagaataataagaattgttattctatacaataaataatatgtacagtattatttgggcttccctgggcggctcaatggtaaagaatccacctgccaatacaggagacatgggttcgattcccgagtcaggaagattacctggagaaggaaatggcaacccacgccagtattcatgtgcttagtcactcagttgtgtctgactctttgcaacccttttgactgtagtccaccaggctcctctgtccatggaaatcgggggcaagcatactggagtgggttgccatttcctcctccaggggatcttcctgacccagggattgtatcacatctcttgtgtttcctgcattggcaggtgggttctttagcactactgagcaaccagggaagcccaaataatactgtctataatactaaaatcccatggacagaggagcctagtggactatagtcgatggagtcgcaaagaattgaacacaagtatgatgttatatatatgtacatgtatatgtgtacgtatatacacgtacatatatgcacatacacataggtattgatacatatatacatgtagacatgtgtgtctacccacatttgggtctcgcaggaggtgctagtggtaaagaatcctcctgtcaatgcaggagacataagagatgcgggttcaggtccctgggtggggaagatcctctggaggaggggatgccaacccactccagtattcttgctggagaatcccatggacaaaggagcctggtgggctatagtccatagggtcataaggagtcaggcatgactgaagtgacttaccatgcatataggcaccggtattcttgggtgggaaatcccatggacagtggagcctggcgagctacagtctatagggtcacaaagagttggaaatgacttagtgactgagcacgcaggcacatatatgtagatgtattatttacatatcattacaataataatagcctaataacaataccaacctctcagagtgttggggtggattaggtgagattagtacaaagcacttacccagggcctgacacagagcaatgactccacatgcatgtttatgatgatgcagccactggggcaggtgggggcctgggcgcaagaggcgtgggtgggcgtctccaagtctcctgccctccaagggaagagctcagccctgagctctatggtgcgttggtctctcctgcactgtgacccttgcagcagctccctgctctgcctgaaagcttcaagagtcaggcagacatggatttgaaggttggctcccacttacgggcttcccttgtggctcagctagtaaagaatttgcctgcaacgtgggagacatgggttcgatccctgggttgggaagaccccctggagaaggaaaaggctacccactccaggattctggcctggggaatttcatagactgtaagagtcggacaaaactgagtgactttcactttgccaccacttacagactgtgtgaccttgggcaagtaactggccctctccaagcctcaaaatccacttttatccctcttgggattggtgtgagggttaaatgggggaacaagtgcgaaactctcagttcagccaggcaagtggactctctatgcttgagctcatcctgagccccatctcttgtttcctccagtttctctcagtggctatgagctgagcccaggacaggtgcatgaccctctgggtgcatgaccctcacacatgcaagggttctcagttatgggaaacactcaccagcccctacatcatgcatgagctcatgttcctgcccttgggtccctggagccatcagagatccgcaagttccccctgtactcttcatgcactcgtgcatatccacacaggctccctctccacattcctgcacacgcacatgcgtgcatctatggacacacagggcacagctgtgtgcgagctcggagaggctggtgcccacaggtgtgtccctgcacacctcaccagcacgcacgctgccacagtcaggggtgttctagccaggcctgccctagccaggcctgcccctgaggtggccgtcttcacagcagaggaatgcagacagctggggatgctctgccagcggacgtgagggagaggcccaggggaaaccacacgggcaggaatccaggcaggcgttccaggccaaggtggagtcctaaggtgtcaggaagtgcggggggggggggcatgtgcagactctaacttgctccagtctcctctctcatcaccctgtgtcctcagcctctaggacttggaggccaaagggttgcacagaccaccgttctccatccaagacagccagccagctctacctgcacagccttgctgcctagcagagcactgggtctctgggctgcagtggcctggtctcagctagaagggatcattcttggcatagggtctttcttcctcactggggaagaatctatgatcacagaagaatctatggggagaatctatggggagaatctatgacccagaagaatctatgactgcagagatcagcagaagaggagtgggttttttttttcctcatttttattaacatatagttggtttacaatgttgtattagttttcctgtatagcaaagtgaatcagcaatatgtatacatatatcccccctttttcggatttccttcccatttaggtcaccacagcacactgagtagagctccctactccctactactaataagtagattctcattcagttcagttcagttcagtcactcagtcatgtctgactctttgcgaccccatggactgcagcatgctaggcctccctgtccatcaccaactcctggagttcactcaaactcatgttcattgagtcagtgataccatccaaccatctaatcctctgtcatccccttctcctcctgccttcaatctttcccaacatcagggtcttttccaacgagtcatttcttcgcatcaggtggccaaagtattggagtctcagcttcaacatcagtccctccaatgaacactcaggactgatctcctttaggatggactggattggatctccttgtagtccaagggactctcaagagtcttctccaacaccacagttcaaaagcatcaattctttggcgctcagccttcttcacagtccaactctcacatccatacctgactactggaaaaaccatagcgttgactagacagacctttgttagcaaagcaatggctctgcttttcaatatgctatctaggttggtcataactttccttccaagaagtaagcatcttttaatttcatggctgccagtcaccatctgcagtgattttggagcccagaagaataaagtctgacagtgtttccactgtttccccatctatttgccatgaactgatgggactggatgccatgatcttagttttctgaatgttgagctttaagccaactttttccactttcctctttcactttcatcgagaggctctttagttcttcttcactttctgccataagggtggcgtcatctgcatatctgatttctcccagcaatcttgattccagcttgtgcttcttccagcccagtgtttctcatgatgtactctgcattagttatctattttatacatagtatcaatagtgtatatacatcaatcccaatctcccaattcatcccccactctttccccttttggtgtccatacatttgttctctacatctgtgtctctatttccgttttatagatgagatcacctacaccattattttcagattccacacatatatgttaatatgcaatatttgtttttctgacttcactctgtatgacagcctctaggcccatactgtcatcattggctcaagtcagagatgacggagacaatgtggaagtcactagaactcttcaggcaggactcatactgactcagcagccagtgtatgttaggtaaggcacttgcatctagcaactccctgagtgcttacaaaagggcctctgctcccatgtacagatggggaatctgaggggcagaggcggcgtcacctacccagatcccctagctggctgactccagacaccagtacgtaaccactgggccatgcggcctctgtcaaagggcacatctcacaccctggaggagaggtttgcaaatgaggctgaaacactgctggcacatgaaagccactgtcccacatgcaggggcagcccagcccaggtggcagagagggctctcccaggtcacagctacatagagatggcagggggaggctgagagccatccaggcttttggcgtcttctggcagcacacatccctggggaccagctgaagctggggaacatgtcagtgttccaagaaatggcaggcacgaaggtgggacatggcctctgcaagttcagccctggggtggagagaggtcattctccatcttcatacagaaaacatggcctaagagggacagagaccaaaaagttccagaagagactgagcagggagaggggctgccagcggagacctgcctccacttcctgaatctctgaggccagggtgacaagtggtggcctcctgtgaaaggcccccgagccaactaggtccctcaccctccagctctagctatttgctgggtggaactgctggggaggagcatgctaggccctggtgctcaggacctcatggatgagggaaggaagaagggagtcagtgcttgaaaaaagtccatctggggaccttccctatactccactggccacactgcctgccccctgcaggttctgtttacagacctggccatttatttacttgctggggagcaaaaatgggaaaatgacagtgctgtcatgggaggacccggaggcaaatgacatgcccaaggccacacagggcagaggattctgacttgtcacaactgctgcttccaggaacacccagatgcgtagccccaaggcgtcacgctacactcaccggggctgccctggggagccgagcctgccctccaactctctggaagaacagggacccaggcacactgcccccggggcagatgactgcacttctctgcgcctctggttcttcaaacagcaatgccttccactcaaggctgttctcatcatccgacggcatcgaacttagatcaaagcatgacctggcacaaaaagcctctcaggcgcctcccctccgcccgaagtttccaaagacttctctaggcctctgcactccttcccaaggcacagctggacttgagacctcgttgtccagcacgagactcaggggaggaaaacaaaccaagaagccagcgtcaccccacttgtcagctggacagacccgcggtccagagaggggcagtgacttgggggaggcacacaagcaggcaggacttctcccataccagcttcatggagagaacaggccttggaccccacgtagtgtccccaggggaccctgggggtctcgctgtggctaagcggcctctcatcccacccaccggccctgcccccaggggttgccgtcctgtgacccacacagggcgctcgggctgccagggccttttagagtcagagccgctgagacttgggaagggggctggcctccctgaggtctcctggggtccccagcagggcagctaagacctgagtccccagcggcacgtggcggcgctgcccgatcggtgatgtcaggcccaccacacccgggccccagcacgttccttctcagagtcggcagagcagagaacaaagcgtcctgcgcattcttgcacgctgactcatcgcctgcacgtagagccacagcagctgctttgcccaaaattggtcgggaggcgggggcgcgccagacatggcagcctggggtcctctgctcactcacctgctccacactctccaggagcccccagtcccaggatttcccaaaacaggcaggaaagcaagaggcactggggggcatgctgttccccaggatagccagggctaccccctgggggagggctcgtgatcaggcacaggtggcaggctggggataaggcgtagatgcaggcactgcttgtctttgagcctcagtttcctcatctgcaaaatggggatgtgccagttaccattttaagcgtttgatatgagttcttttcccatattcttacaccaaccccaaatggaaatactgttatcatcatcatctcacaggtagggaaactaaggcacagacactgatttgcttgaggtcaggtgctagtgggcttccctggtggctcagtggtaaagaatctgcccacagtgtaggagaggcaggagacatgagttcagtttctgagtggggaggatcctctggaggagagcatggcaacccactccagtattcttgcctggagaatccatggacagagcgtctggtgggctacagtccatgggattgcaaagaattggacacgactgagcactcacccaggcacaagtgctagctagctgcagaggtaggatttaaatatgaattgtaaggttccagaatctgcatgtatcccctatatgctaaaatgcggattgaaatatctggtgcccagcaggtgttctcactgtgccctgacccttggtggttgagcctggtccctcacttcacctcactaaacctctaatccctcacctgtaaggtggggtaactgtgaaggatgccctcaagggattgtcagggaaattacactgaaggttcaagtgtgatctgtggaagaaaaggtagatttggttcaacaagccttcaaaccacctttggtcatctaggccaataccaaagtacagagaggagacgagctatgcctggggtcaccagccaggccaagccatactcgtctgggcctccccaggagtctggggaacacggagttgcctgtactctttgggaaagtgagggagcaggaggggccctgccatattccctctgccagcctggcctctcgcccccgacagcctgatttcagagaaggtggagttctttggatctgtcctgtgtcggggtcagaggcttgccctgagtttgtaggaatgaggtggccaccaggtggctttgttctcagctcttacccaggttgcggtgtcccccatctgaggcttgtctgatagtccagagaaagccctagaaggaattcagcacccctaccaccaccagcccccgagccaggcctggtctgggtcccagcgggtctgggccaccacggcacagatgcgcaggactccactctgtgcgctcagtcgctcagttgtgtctgactctgcaaccccatagactatacatagccaatcaggctcctctgtccatagaacttcccaggtaagaatactggagtgggatgccatttcctgctccagggtgtcttcccattccagagatcgaacccacggctcctgaatctcctgcatcaacaggaggattctctaccactgcgccacctgggaagactccactttaagctcaggaggaggtcagctcgggctgggtgtgcacggcctgtgcactggcctccaagctcctttcatccctgggtcctgcacactctttgctccagctcctagcacgtgccatgctcttccaggtctcccagcctttccccatcccatacctcttgcctggaatgccttctccaccttcagagcctcttttggatgcctcttctgctggaaagccatcctgacctttcaggaagaggcaggcactcattcctctggggtcctgtagctctttgtcctccctctttggccaacagaaagactgacacagaacacacactggcccttatcccatagacccccccccccgctgggtccatattccaagaaaaggccttcaagggccctccccccaaatcccaactgggacagagacccacagacccagcccaggtcttgcagagcaggctcagcctgtctactgcatgatggcaaaaggcacagcaaaggcgcctgaactcccatctcttctgctcctggctgtgtggccttgggcaacgcctgtagcttctctgaacttcttcattcccaggccttgccttgcccacttcccaggcccgtttggaagatcaaatgaatgaaggcagagagaatgcttggcgcgtgggcacagctccccacacagctgtcattatcaccgagtcattattacggacctgccttgtgcctggggggggcggtgcctccaaggctgggcagcaggcgggcaggcaggcgatgaactcagaagcagccgcagcctgggctgactcaggctgaggcactgggagaagtgggtgctttatggtcagcctgagccagcccagctctggccctctcctcctacccccaggcgtcacccaaatctgaggccacaaggccttccaggccctttcagggcctcttatctgggaagataaaggccccctccccttgaatggtggatctattcaaatggcttctgtgtgaccttggcaacagtcaccctctctggaccaggcttggggagttccggggtggggggcaggcagtgacctcaaaaggctcccagtgtgtcttccaggtgcttagtggggggactctcccactgctttgggccccagagggatggctcctgttctctccctccctgacactgacctgctgctgctgctaagtcgcttcagtcgtgtccgactctgtgcaaccccatagacggcagaccaccagactccgccatccctgggatcctccaggcaagaacactggagtgggttgccatttccttctccaatgcatgaaagtgaaaagtgaaagggaagtcgctcagtcgtatccaactcttcgcgaccccatggactgcagcccaccaggttcctccgtccatgggattttccaggcaagagtagtggagtggggtgccattgccttctccaggtgatggaactcccagtatcctccctagagtctggagttattatttttatctgacacataagaaaaatgaggcccagagatcaaaagaccctcacctaaggcagcacagtcaacagccaggacacaggcatgtgaccctgccagggtcttcagggcccacctactgcaatcctctattctcctgtggcctcctggctggcgacggctgcctctctctttccctccctggtggctcagagggtaaagaatcggcctgcaacacaggagacctgggttcaagatcccctggagaaggaaatggctactcactccagtattcttgcctggaaaattccatggacagaggagcctggtgagctacaatccatggaattgcaagagttggacatgaatgagctactaacactctttccctacaccctaggacaccagctctatgccaaggcttggacaacagtcaccaacttatgagatcttcacatgaatgtaagacagaggaggaagtcaaagctcagagagctggaattgcttggcctggtcacacagcacagtggtggctggaggctcagtctcccatacctctgctctgtgccctagaacagctgctaccccaggatggtaggggtttgaccaggcctcagggagcctgcagggcagccctctggtttcacagacaccccctggctatgggtgggccaaagaggaagggtacccatcctgccaggatggacctaccaggcccacctgggcccgacgctccttgccaggctcagatggaagcatgaggtcattgggccatccctgctccctgttggctctcgctgctgtgactcagccctgtcttccccaaacctccttctccagggaactctagcaatggtctggcctggccaggtctgctcccgctgcctgtccaccctctcagggcctcccagcctgagtcaccgctcacctcaccacctggcacaatgctcaccgcataaacagactattcccctcccccaggctcccagggttcctctccctacagcccaggagccaggctgaggggtgggggcacttttcctgctgtccccagacttcggccctgaggtccatccccagaacctactttcagggactctctggccttgataggaaaatctagaattgagattgaggcctcagcccagggctcagactgacctgggctcaaatcccagctccttccttgttaggtgggtgaccttgtacaagatacctccatttgaaggagggcaacagtaaaaccagctgcagcccatgaagatttcctacagcatcaccgaggccaggatcctgcttaaaaatgcaggtggctctagattcaaatggtggtatggcctcgcgtaagccactttgcctctctcagcctcagggtccttacctgcaaaatgggaacgagaggaagagagccctcctgctgtggtgactaaatgtgataagacatgaaaaaggtcaagccgtgtctggcacccagggaccaaacacgggtaaacgtttatgtggataaacggtagctgtaattaaatcttaaagtgacgtgtgcataacacatagctcgtgggaagctgccacatagcacagggagctcagctcagtgctctgtggtaacctagacagtgggatggagggggcaggcagagggagatccaaggaagaggggatatatgtatacatatagctgattcatttcactgtatagcagaaactagcataacattgtaaagcaattataccccaattaaaaaaaaaaaaagtgccaggcgttaagtgatcccaggatggttttaatgaatgatggggagatggagagcaatggtctggctcttcactggatgatggagtagcatcagggaacggcttcccaggttggaaagctccagcatcccctctgcaggttgaccaccccacttcccttagtgggtccagaaggctctctcaagagtctttctggctggggctggcctcacagttttccagtttccaggccactcaagaagcacttcactttacagaggacaaagctgatgctcagacaagggaaggggcttgtctgcagccacccagctggaagctgagcccaagcctgcacttccgtgttccccttcttcccagcctgggagctgcctccctggactggggataccctcacctcccagtctcagagagcactctgggagagtctcagagcttgtctgcacactggagactctttatctttgtctctatcttcccccgtaatgctcgagaggcagctccttgggccatggggccagtgaaagaggagaggacccaggagaaaacttctgtgacctcctcatttccagttcaacgggtgatgtgttgagcatgtgatctgaatgagggaacagaggctgggggaggtcgcatacgtaaagggtgaggggatagaaataacactgaccctggggtcaaacagacctgaattcaaaccccaaccattacacgtcaagctctctaacttctcagaatctgaagttgcatctgaaagcagatgccttgagatgcctcaaagggttatgctgcaaagatgaagtgagagcaagagtgtgaccaggctccgtaaatagggatgaaagtgaaagtgaagtcgctcagtcgtgtctgactctttgcgaccccatggactgtagcctaccaggcttctccgtccatgggattctccaggcaagaatactggagtgggttaccatttccttctccaggggatcttcccgacccagggatcgaacccaggtctcccgcattccaggcagatgctttaacctctgagccaccagggaagcccgtaaatagttatagtcagtaataatgatggctaccaccgatggagctcttcctcatttaatccttacacagccatgttactgtgattatacccattttacagatgagcaaactggagctcaaaaaaggaagaaagggcatatgtgatggggaagaaggggtctgacaccagaaccagagaccttagctactagccagccctcagagacataaaataaagcctagccagaggtggttatgggcgtgtgtgctaagttgattcagtcgtgtccgattctttgtgataccatgaactgtagcctgccaggctcctctgtccatgggattctccaggcaagaatactagagtgggttaccatgcccccctccaggggatctcctgacccagggaatcaaacctgcatctctatgtcacctgaattggcaggcaaattctttataccactagtgccatctgcaaaggtggctatggatgagaatattgtgggtgttcagaggtgagttagatctcatgtcttggatggagttgggaaggctggtccatggggtcacaaagaatcacacatgactgagcatgcacgcacgcacctgggggaggcaacctttttgatgggccttgagtttgggcaaaataaatcaagtaagaatggaaggaggaggaaaggcccaccttgcacagaagttgggaggcgagaaagtgtgcagtgtgttcaggaagtgacaagcctctgggaaaaggaaggaaagacaggtccaagtcaggtcccaagcaggccttatgccaggtgggcatttggactgaacaagatgcttcacgctgacaccaggccaggtcctggctccagaagcctggttttcataggaaggcaaattgacccaagtctcaatacccctcatgtctgttgtggcatcaggtactgtgccaaggcaaatgtgggtgagtggagcaagccaggctggccttgggcacctggagggactgtgtgacccagggcagtggaagggatgctcgtggtgcagctggcacatggtgtatagattcacacactttctactacatcccccccaacacacacatgcacacatcactcttttgcaggagtgtgtccacaccaagaggcccacacacaccctgcagcctgaggtgagggagggagagatagcagaggcctgctgaaagaaactcctgtgccaggcaatgggccaaagcgtccacgagctctgccacaaagcctccttgcggctatgaggtaggacttttcttcttaggagtctcggatggatgtgacctctgatactcaggaaaattaaacagtgctatacgcttggtcccaaggttggtgagcagcaaaatgaaagcacagactggctgcccctgccctgagctccgtagggcctgacacagtgctgggcactggggataagtggaggattggagtctgagtcacagggctttgaagctggcagccagagcagcggagcctcagagattccaggggtgggctggcccctgactcacccccacaccctgaggctgccccaggcagtggctttagctcctggccgccctcctgcctgccagagcccagcaaggcctcttctgagtctgtcatggctcaggattcccaggagctgggcgggcagggccaaagcctcaaggcaaggaggtatcctgggcacacctctgctcaggtatgtaggcctagagtcacagtgggaaccccggacctcaccagcctgatgtcagaggcaactaggcacttggggatagctgttaaatgaagaatgaaatactgtatttctgcatggcccagactccgggtggctcaccccttcccagagggaagacagccgcctggtgaggtgctgggtgcgccctggaaagtatgggttctaggcaacacggtgggtgtgactctgcaaaaccaccagctgcgtgtcttggctggtggtagtggagggaggagaaagctggggttccagcccctccaagtgcaggggcctcagagatgagaatccaggcattctggatctccaggatctctggtgggctgttccttctccctgtacctcagtttcctcatctaggtgtaggccaagggactttccctctctggctgcctgtcttttgcttttagaaattatgtccaagccttcatcgttagagcattttgaagatgtaatcaggcagaaaaggggacataagtcttcttcatcttaagcggtgtctctgcaagggcagttttgtctgatgagattaagtcatcttgtatattcactccagccttgggcctggaccatgtgcccaggcctgtgtgctaggccctggggttgggattgcaaagaagactgtgtctcagtgagttcataatttggggggagagacacctctcccccagaaataaccagatatttccaggacagtttaacatgcctttcaaagctctttgacctttccaatatctctaaccacatctgtcatgatggagaatagatgggtgagagattggttgtatagatatatggatggaaggatggataaaatgtcagataatggataaatggatggatcaatagaagggtggatggatggctgtggacatgggaggttgaatggatggatggagggagggatgaatgggtgagtaggtgaatagattgtgggggttgggggtgggaatcattgaatgtgtgatttaggttcctggtcccacagcagatgaatataaggggaaagttccagtcctgcctcttgttcattgtgtgaccctgaagaattcacttctttagctgtagagtgagaatctgtctggaaagacctcacctatcaagtgagagtcatgagcccagcctgcatcccaggtctgttgtgggtatccagtgaaagaggtatggactgcccatgcctacataatggctgtgatgagtcctcagtcagtggcctcacaggcaccggcaacgtgaggtgtttttgctgagggagtgacgcccctctgtggttgctggtgtgttcctaggcttcccacttcctccagcctgcacagagttctctgcccagttaggagcaaaggaggtgacctctgcagaagtgttgctgccagaggctccccatacgctgtacttgtcaaggagtaattgaggtgtcctgtttgttattcatctcagggtaagagtaggctcagcaagggggcacccagggcttgggattagggctttggagttacatagatctgccttccagccttggctctgccacttcctagctgcctgacattggacaaggcatgagcctcagtttccccatttataaaatagtaacaaattatagtacctaccccttaggtaggttatgacaattaataagcataacttatgtaaccacctaacatagagctcagaatatattaaatgcatgtgtatccaagtgcagaattgcgcccttagaactttgaagaaaagtccaaaacttcaagtctagagacctccatcttgaatgctcagtccttggattagtttccttatttcaaaatgttcagtgggactgacattcttcttgacaagtgtgccttgactgaacagtgtctggttttggctgcaattccaggagttccatgggcctcgctgaccctgtcctgattacccttaggttaatagcagactgggcacatgaattatccctttaaaagtggtttgtgtgggagctacaaatctttccaatgggctgagctgtagggaggaggagaatttagaagggggtgtcctcccggggaagccgcaaagaccaggagagctggtcccacaggaccgaggctactcttgcagagacccagtgtggggacgatgccgtgggcggtggcaggccctgctggctcagggtgagctgcagccgatggcaaggggcccagaccacccaccagaaagaggccctgagtctgagtggccctaggcttgagtgggggcagtcctgacctgtagccctgaggacataactcgggaacaggtcattatgggaatgtctaagctccctcagtcccgaaatccccaactcaggctggctccggggccataccctccccagacccccattccttgcagggtccagatatcccccttggccagccccatctgcccatctgctcgctctgctatatgcctgcatggtatgtgcctgcgactgagactctgtgtcccttccattgggactgcaatcaagagagcttcctgaaacctggtggggccaggtgacaacagggaagtggctggttttccagaaagtgaaagagcaaagggttccaggctgggagcaggagtgataacaatgaagtcacagagtctgcagagcttgcattttgggagctggaaactcagggcaggttgattctgcctgtcgtaggctatctgagctgagcaggcccctcacagtcgatgggaagagaggaaagctgtccagggaagccaaggaagggacaggacttgcccaaggccacacagcgtgaatagcaaagctggggacaaagctgcccactgctacaacatcgggtagctgctccagccctttcctgccctgttggacatcatcagaaggatgtttaatcctcgctcctgtacatcctccatcccatgccactggacagctattcgatgggaccaaatttatcattagtacaggggcaatcaaaggagctttggggtccccaggaaggtggcctaggcccatcccaatgtccctgccttcctgccagtgggatccttcctgacagcccttctcaaagggacccagtgcggctcagcttggacccctgggaactacactggtgtgcaggaaagggtgagtctggattagtagcccggagagtgtgtccagcccatcactgtcttgggcaagttgctcctcctcttggacctcagttatctcatctgcccaatgggagtgaaaaccagagagaatttctagaaggcagttcctagcatggtatatttcttcacccaaaaatacaccccaactatcctcttctgccagcccgccctccccacaaatctctgcttcttggattaggctggtgccaagtgtaagtgaagcaaattagtttgtgtgcaaatcaattcctccagcttctgacagggtgatctcctgtgaatccctgtgcctcagtctgcagcctttaccaacccaggcagggagcggggccaggtggggctgaggcagtgcagcagagcagctggtgggggcagtcagtaggaaccagagcaaaggagttgagggcccatgcagccaggtcagccaggaggcatagaggtgactgtcggggcccaggcctagagacctagggtggatattcttgttgttcttgttgtttcttagttgctaagtcatgtccaactcttttgtgaccccatggactgaagcccaccaggctcctccgtccatgggattctccaggtaagaatacaggagtgggttgccatttccttcttcaggagatcttcccaaaccagggatcgaacccacatctcctgcattggcaggcaggttctttaccactgagccatctgtgaagcccacgggccaggaactaaaggaaattcatgtgtgtattggaacagttggcttgtgcagacagaccatgatcatgtcaaaggcaagggaagagggaataaagaaaactgctgtttttaactcggcttgattttctctacctggaaaccaatcttgccagtgaggtggtgctgttcccggaacgctttcagccgctaagaccggggttcgctcaggttcccaggtccggcgtctccatttcacaggagccctgctcgcccggctggagcagcgggcagggaaggagggaaactggagttgggcgcagcctcccaagctgaccctgccaggccgggcggtggcccctgtcctgtcgtcatcctcctttcacagcagagagggatcctgtctcctggtctcgttaattcttctatcatgtttcccagactcggagcctctggttgcctattgtcctgagcaggcattttgcatttatgtaaagattagacaggttagaaccttcgctctcactccgatggtcttttttactttctcaaatccaagttctttccttctcactgcgctctgcttccttattctctctctctccctacctgtctttatcagcctccctgtttattttcttcccttccctgaccccctccttctccccactgacctgcttttcctctgtcctctcttcacagttcagtagtttgaatcctctttctcccccctccaccaccgccaccacaaccctaaccttgcttaattccatatttatcttctcccggagcctcatagaaatgactgaaagcattgctcacctcattccagaaataactcttctaaattcttagagaggcaccgcacgggggagggtgtgagcactggacagggagtcactgtggtttactggagagaacaagacccaggttcctctgtgggctcttgggtacaccagctgtgtgaccgtgacaccgctggcctctggccagtctctgtttcctcccaggcagcagtggagctggcacccagatgagaacagctgtgtgtaaggttgtgaaggagagaggacggtggtgccctgcacacacacttgtgctctgaaatgtttttcctgcttccaccgcagcctgagccagtcggagggaaggaaggggatgctaactggtatctccctccttggttctgctctgctctacagggatcacacatgcgcgcacacacgaacatgccctgggaagaaacaaagctgtttcttcaccgtcatctatttctcccttccaaaatgtctaatggtaaaatcccaactgaacacaggagcaaaaacttgggctttagtgggttcctgaatttctccatttcaaatccaggccttcattcattcaccgccccctccctcggacagcactcactcagagtctcctactgtgtgccagacgggctccagggctggccttctctggagctctggacctcgagattgttggggagataagcccaatgtcatgagtcaggcatgagagagagcacgggttctgggagttccaagaaatgagagggcctttcctcttgtgcctggagacagggtccctgagaaggagggactctgagccagccgaggggcaggagcaggatgctggcccccagggagcccctccatcactctgccttttttgcagaaagtcacagaggtgagccaagacatcctgtcctggccaagatgggaggttttcccaggggcttttggtgtacatatccacaagccacctttctggaaagggctctgagggccccttcttagcatcaaggaaatctgtgggtcacataggttaagaagaaggaaagaagggcacttcctgggggaggtggggaggaggcggctccaggctggtcagtggtcaggggtaaactgtgtccttccctaaggaaagcaggcccagagaaggctctgactctcccaagtccacacagccttgtaggtcatttacctcccacgcagcagaagggacaccctccacctggttgacagtaggcagacaggaaagcagggtctcctccaaggaaagggagggttttgcccatgggacctctccctcccaactctgagctctgggcaagacccatggagagtggggaggggctcacggcatttggaggatgacttgagggggtccagtgggactgaaaggggtccctggggacagcacgggagcctcaggactccaggaggtgctccaggctcagagggagcatcctcccccctttttcctccctcatcctgccctcctccctaccgcagaggctggggcgggccgggcgccctgggaggaggcggtgtccctggctccctgcccaccggtgcagggctggacgggcaggggcggagccatgcctggtgttataagaggcagccagggcaccgaggcaatgagctgtcgctcagcttggcagcaggacgctggcagcaggcacactccgcactccagcccagcctgagcgtgcctcaccactgtggtcgccatgcccaccgccttgtgctccatcgctctagccctgctcgtggccctgcacgaaggtgagcaccccccacgggctcagcagctgcagcagccccgaggctgcttgtctgtatctcctgctggggctctgtgccccccaagccagccgggggccttcaggggcaggagttaggtggcttgggggctgcaggaggctgtgctattagaggtgctgccgtcccaggacagccaccggtccttccaacccagagctgctggggcttccccaggctggcccagggctcctgagcactgagaatgccaacttcctcgattatgcaagaggaggagcccagcgggtcccccatcccagctgtgccaggcgccctgacccacctctccacttttctctccctcctgtgcatgcaggcaagagccaggctgctaccacccccatcccagagcaaccagcgcccttgccccgggcccgaggctcccacctgcggactcgacgttgctcctgcagctcctggctcgacaaggagtgcgtctacttttgccacctggacattatctgggtgaacactcccgggtgagctactggagggatccaagaggggttgcagggggcaggggtggggaatgctggcatgctggggaagccctggcacactgcagctctctcttggagtgtggggctaacaacaatagcaatcagctattgcttcagttctcacgtgggggctgcctgagcaagacagagggctgtctcatgaaaatcctcacaaaaagcctggtcagaaagtgttggctccattttccagatcagggtactgaggctcagagaagttaggtgccttttccaaggtcacacaggaagagtaagtggtaggtaggaggctccagcctaggtctgcagatgccagagcgcacagcggctctgccatgctgcctctgtataatcttccaagaatgatatgattaatgacagcacccatgtcttgactgcgccaggccctatgccaagcactgctggtgcgttatcacctcgtgaacgcacccccatcctccccagtgaagcggggactgctgctgtccccaaatgacagacaagagacctgccccatgtcacctggcagagccggggtggggtcccagagctgtctgttctgtctgcacccgcgctgcctccgggccactgcatacttcaagttgaagtttctctgtgtgtttgtattttttttttccttctccaaattgcaaaagacaagagaagcccggcacgtaagcgtgtgtggagctaatccgcatccaaacactggctcagggcgggaaccctgccagtccctgcgtgctgggtctacctggagtctctgcagctccaaccacaccgtctaaaattagctcaggcatccgaggtgctggtctgaccggccacggggccctgcccttcgcctggcccgtctcagccagacggaatctgaaatcgatctcagccaatctaatatatctatgcacacacacgcacacgtgcaggtcaggcacacgcaccattttaaagtcaaaactctaagaaacacttgggtcacccttccaggcaagtggtgaccggatggaggcagctgagctgtgagcctgagtgttcacttctgtgagagggcactctctccctttcttccagactagttgggggtcttctttgagaacagggggaccagcctgactccatcagttcaaattgctgtctgggagtgagaggggcagggaggacagcttccacccctcccccccatgctgagcgtcttactgagcaggaccagggcagttgggagggaacagaggcccgagagggtaagggtcttgcccgaggctccctggcatgtaaggaggaagctgcagtgggaattcttgagggcaggagctggttacttttgctgccaccctggtggcatggatggctatcccagtgtgcagtgtggacagtcccagcttgccaatggtcctggtttatctaatcctctctctgtctctctccaccctacaccactaccttgctggcggcccgcccacagacagacagctccttacggcctgggaaacccgccaagacgccggcgccgctctctgccaagacgctgtgagtgctacagtgccagggaccccgcctgtgccaccttctgccatcaaaggccctggtaagtgggcacccagcctgcaaggggccagaggtgactgctggcctggacctgctctggagggcagggtgtctggaaggccagcagtggcggactgttagtccctaggtcgtgcccgactgtttgtgaccccacggactgtagcctgccaggctcctctgtctatgggattctccaggcaagaataccggagtgaattgccattcccttctccagggtgtccaggaggccagcagaggcgtggctaaatggtggaggaggggccaggggagcagggtcctgggggtccagaggctgccctgggctgtggggcagcctcccttcctgcagggagccagtcacccttgagtcttcccccctgccactacccccagctctgggggcttctgagaccattgcgtccccactcctgggcaggaggaatcctccccaggtgatagctgaggcagcacaggtccagagaggaaacaggacttgtcctgtcaggctacacagccagttagacgagagctgggccttccgccttagtcgctggggctctgggacctctggaactttctcagtggagaagcagtagctggagttggggggccatggcaccgtccccgagctgccacaaagcgcctttgccagtcttttggccctctggacctccctccctccacgcggagcgttgggaaagcagacagtgacttcaccctcccctacctcccgctctcatgaaggcctatgggaaactcctcccctgagacctcagctgtggctgcagccctgcctcagtttccctgctgagggttctgcttggctgcaagtggccagactctgggaaggccagccaccccactgcctctttctgaggctgagaacgcattcccagtggctcagttttcctcaggccccaccccacctgggaaaagaagggtgccaggtgcacagggtggaaatggatctgctcctgagggcgggtcggggcggggggctgggctgggcctgcagccaggcagcctgggggccctggacagcccctcacttgggccctaatgctgttcactcaggactgatgcggtggcagtcccaggcagcgggtcccctgcagctgcgttccaggatggcaagacacaggccacagcaggagagctcctccagcggctgaggtgaggggcccctacactgattgagtgccttctgtatgccttgcacatttcccttattctccatatgacgccttgggtccttatggggcagccaatagcagctcagacagatgaaggtgtttacccaaggtcacagagcaagctacagcatctggctgactcaatagcctgtgttcttaaccactatgctctttgttaccgccaggcctggaagtggacttttattgagggtttcaaggcttgtgactgtggaaggttcccaggtgttcattcaggctgtgtctgaatcaagcatctcccacatgctggggtccaaacggatgctacccagcctgttccctccctgggtcccagactggactgtctccctggtagctacaacatggctcagctcaaggcttggcatccaggaggtgcccatgaacgtgtgtccaaccaaactgacttgagaacagaaacctatagccagtcatgtggcagggtggctgaaggggcagcatctgagctagaaagtcccagccctgccacgagcaagctttgtgaccttggtctgctcactgaacttctctgtgcttctggttcctgtctgtgaggcagggacaccgctgctatccatctcacgggcttgttgaagtttagagcagttgacatacatgaagagccccaagaaagcccaggccctacgggagctctgaaggttttagccatcccgaacctctgtccctgagggttcctcagggctgcccagggccggggtgcagcctagcccctcaagggtccacatctctgtgaggaggcggaaacataggcaaaaagacaggatggccggctaggcaggacccaggatatactgaggaactatcttaaaaaaataataataaaatgaaagtgttagtcactcagtcgtgtctgactctttgcaaccccatggactatagctcaccagactcctctgtccatggaattctccaggcaagaatactggagtgggtagccattcctttctccagaaaatcttcccaacccagggatcaaacctgggtgccccgcattgcaggcagattctttatcatctgagccactagggaaacccaggaaatgtcttaagatgaaaaacttcaaggtaagactttgcaagtacttggcattccataattagcaaagagtgttttcgccagtctgtactcagcctcacaccagttcaggcctgtgtttattttacagaccaagaagggggttcagagaggttgagacccttgcccaagttcccaaagctgggaaccagcctcccagttcccaggctagaacgccttaagccagagtgaggccacctagatgacggcagagcccctaccagggtctcagccagattcaaaggactgctaggatccatacatatctggagctggaccttgaagaatgggaattttagggcacggagtatggggtgagtggaaggtcaacagcctgaagagccacagggatagaggtgtggaagtgagagggcaatcaggggagagccacggggctactcttggccgtgcagtcaccctggtggcacttgatgttgagcatcaattttgtcaaagctccttgtgggcagaaaagcttctaacctgccccggcctctccttgaggttcagaccttgttttcagggttggctgtgaccaccctctgacctcttggccatgaataaggaatccagaccctatgaccgctgcctctcatggggaactctcaagtgatgtatatctccagagatgctcaattgacctctttccatttcagggttatttctgcaaccaagatccactttgctaggcaacagcagaagccgacgagggagaccagacctacacactccaggcagaggaagagatagctctcgactctgggagaactttgggaaggaagcctgtgtggatacaggaggagaggggcatcccagagctgggagaccttccgacctgtttcctgggccagaaaacccagctgctggagcaggcacaagctctggcctcctcgccctggggagggggcctcgctcaaggcagctccgtgacaccaggaaagtcatcaggccccaggctgcagcgtggcctcccacactggctccagttcctaggccctgctgaaaggaacggcatgcggaatgtgctagcctggaggtgtcctgtctggcggctgtgaaccaggaacaacgtgcagtggcgggcactcacacccaagccagcccgagtccttccagggttgaagtcccggccgcccccgacccctcacccccgctctgtcccctccagccctcgctctccagtgtccttattctcccttcataccctcggggcactcttggtgagaagggcctgcaccacttcacctgtctgtatataacttatttgctctaagaaatttgacgattccgattatttattttaacgtatttttttagactctcaattatttacctgcgaacttgtgtttgtaataaacaacaaaataatgctctagcatttggtcttggttgagcaggaggtgggaggcacttttcaggaaggggctacttagaagtgaagggaacaaagggacggcggggaaagagcctgaggcaggtgtggagcactgagttccacacccctgtgccccggctgggcatcgctggctgctgacccaccctctctggacttttgcctatcatgtgcctagacagccatttgcagctttgatatcccgggttccaggacctgtgtttctatcaggccggtaagtgttggccaggcctttccccagagcatgtttcataggagccaagactataaggacccacttctgctctggttgccacccctgaggttcagagcaaacctgtccagtgagggctgtgtgctgttccaagactgtgtgcagccttactggccagggatggctgttgtaacggagtcacaggctggtccttatccctcaccctgggcttggacagaccccgctgggggcgctcaacacttctctcactaaagaagcccagggctctagcactggcttggctgatcctgccaaggccccaggaagctgctcacctgagtcccagggacagccagaagctacccccgctggcagctcctgagacctacagcctccactgctgccaaatccccctgcgaacaaactgttccctttcccctggccggcctctgctgggaatggtacgctgtggcctgagccagttattgaaaaataattatttacacactactctaagcctgccttgtccatggagccagccccaactccctcctgggagaagaacatgttgacgcatattgaactcctactgtttgctggcattttatgcagataaactcacttcatcctcatgacaatcccatgatatagatacttttattatccccattttacagatgaggaaactaatgcacagagaaggcaactaattttcctggggtctcgcagcaagtaagtggtagcatcaggatttgaacccagagtgtatagtacacatgtctatatgtactgactaaatatttgttgattgaattcatggattaccactgtagtatgacattgaacaaatcttcctctttctgagcctcagttttttaatctataaaatgggaaacagtactttccactttgtagagctggttgtgaaccctaaatggatgagttatggtgctgggctcagtcctgggcctgatgagaggcaaagccgaatgtcaggccgttagaagtgatgatgtaacaagagggacaggcacaaagctgcaggacctaagttggggggagattggggctggctggtgtgcagaggcatggtcagagaaagatgcacgactaaggtgccactcccacagcctaaggagagtgagactcacatcaatagaaggaaagtgaagagggagccccagacagagcagacaggaagggtaaaaggttttggcaatgggagtgacaaaggggtttcccatggaggaccccatgtggctggagcatggtggggagagagcagcaggagaggaaaccaggactccctggaggccaaagtagggagcctgcactttctctcatgggccatggggaccctcgaaaggtctgtgggcagcagggacctggtaaagccagactttgaaaaaatgccagagggccacacagggggaccctgaatggggagacagaaggcagggaagcaagtcaaccgctggtccttagggatccagcctgggtggctggggttggcgatggagccacacagtcacttcctacccaggattccggcacacctctgaaatctcactgagcctaacgccaggtgaatctcactccccagcatcctgttcaaaataaccctgcccccacggaaatcccaaagcaacggccaacagtcaggctaggcagtgatgtggggcaaccccagcatggcaggagtgatcgagaccaggtagaggaatgtaggttgaaggtgtgtccgaggcccagggaattaggcattcactgccctggtcagagttcagagatcagcgaccaaatgattaagtaagagacaattagagggaggcccagaaggcaggtgaaggcaaggcgataccataacccccaggatccttactctcaagaaatgggggcccctggcttgggccctgcactctagccctctgccagccatatctttctctccaaataagaagtttgcagggtgaagggtcatgaatacccaaagtctgagcctgcttctaaaccacattccatgcagcaggggcctcagaagtgtgggggaaggtgggatagagtttggaagaagcagaggaaaatttatgaagaactgttgccaaatcaaactgaaccctgggaagaaaggtgtcaacattttagaaagcatatctggattttatgggacaaaatcgtccctttttcctgcctttttctgccttttccataaatacttacaggtttggtttaggctttctgagttaaacttgtgttccttttaactggaacaccaggcggagataggccagaagggggcacagggtgacccagatttattcgggtcatgtgcatgcatggaagcagagtcagaggggagtggagttccatgtccaggactgtgcagcctgatacatatccaggctacagactggccctttcctgtcctggactgcctctccctccactctctcattcagcaaagaaccccaaggaactagtttcactcttgccatctcactctctctctgaacctcagggatttcaattgagaaaagtcatttgcctatcagggcaatgaatcattggagtgtggccatccatgcgttcaacaattatgaacaatcaccgttcagagactcccgtaaacaaggcagacacagcccctgccctcacaggccaagaggagagcctttcaataaagcactgttactatgaaggtagaagtgaaagcatttattgagtgctcatcaagctcttcttgcacatggattctttggatccttgcagcaaccttacacagcaggttctatcatcgctattcccagttgagagaagagataacggaggttaagcagctcacccaaagtctcatggctagcatgtggctgagctgggatttaaatctcaggctctcagcctgtctgctgtcctgctgctctaagcaggtagatccatacatagtgtgattgagcccctcgggtgggagagtctgggaggcttcctggaggaagtgacagttgatcaagagaaggagcgggtggacagagtgttcaggcagggggaacagtgtgtaggaagggagctatattctctgtgcttagtcattcaatcctatttgggacctcttggtctatagtccgttaggctcctctgtccatgggattctccaggcaagaatactggagtgggtagccatgccctcctccaggggatcttcccaacccagcgattgaacccaggtctcctgcattgcaggtggattctttaccagctgagctacccaggaagcccattctcagaccctatcagggaacaaaagaaggaggcatggggaagactggagaggggttgctagcggggtcgggggggtggtgggcatgcggctacaagcagggaaatccacagctgctgtcacctcacccccaatctgtgacagcctcagacaatgtccccctggacaatattgccatgcctgaaacacacctttggatcaaaccgtgcttgcgccccttggggtttccctaggctggcaaggaagacagacaaggcaaagtgaagagacaggaggtggataggttacgggctgcccttccagctgtgtgcccttcctgtctccctgggatctctgctcatttcatcccaggggcgttgtgggttcacagggaaagcttggggaaggagtagggtttgcacacactgggatgagggaaacagccggagcatagaagaatccgaaaagaggcagcaagcctgattggcaagggccaggctgggaacagcatgcagtgccaggaatttgaacttgagtgacggggagccagcgaaggtggctgatcaggggagagagccaggacaggagctggccttgggcagctggcttgtcctcggctcttcctgcctccccggccagtgcttccagctcaagggggccctcccagcccctcgcaggagagacaaagtgtgggccttgcctccgcctgccagggaccggagccaagagccctcagcagctcggaagggggccatgtgcgggcccgccaggagccctggaagaggaatgtggcctaattaattctccaaagctcagagggcctcgccttgtgggagcagctgccaggacaggcctgccaggacgccacaggcccagcccgtctatcattcagtgctcggggacagcaggctggaagcctggagacaggggcccagggggccagccccttgcctccaggtacacacgtgtcctccagccccttaacagaaaatagtgcgataatagtaataatcgccaacaggccttgagggcttaaaggtgtgtcagactctgtgcaaagcctgttatactcacttctcatctattcattacgaaggaccagtgacagggaaactgttaccatctccattttgcagatgaggaaactgagggacagatgggtgaatttccctggccgaaatcctgcaatcaaaaagcacacgcagggaagctaggattgggatgtaggcagcctgggccccacaagcatgttgtcataagcactgctgagccagcccagcgaggacatggaggcccagggtggagcgatacctttcccggggacagtcgactaaaaacaggccctgggacattgaatagggaagaaagaccacacccctgtcctctgcttgaactgcctcctcctgaagtttctcatagggcttttcctgtctcagcccgtaggtcatcctcaaagacatgtgactcgctactccaggcagatgggctggaagaagacatgccgtctccctgggatccctgctcatttcatcccggtggcgctgtggtggctgcactggcagctgggcgaggtggtctcacagcttcctcctagcccgctttccatccgtccacggaacacatcccctccaaggcgggctctgaatggtgcagggacggctgtaccagggccttccaactagaaagtggcagacccaggagaagatgggcacacagactggcccgaagccaagactctgctcttcctcagcagcagagcaggaggagggcagtgcagccacatcgcatcccctctctgggcctcagtttctcatctgctgtatgggcctaagagcattaactgtatagtcttgtcctgcattcatgcaggctaagttgcttcagtcatgtccgactctgtgcgatcctgtggactgtagctccccaggctcctcaatccatgggattctccaggcaagaatactggagtgggttgccatttccttctccagggggtcttcccagcccggggatggaacacatgtttcttacatcttctgcgttggaaggcaggttctctaccactagggccacctgagaagccccatagtcatgtcctggaactcattcatgtgtcaagtactgtccgaagtagtttacttaatttttaaaaattttccaaagcaaggttttttcatagctttgtaacatatcaccataaggctgcaccatatgcatctgttactctgtaggtgtgtattttagtttgtcccatttccctccaatgcaatgtttacatgtgtgctacatttatacacaaattttatattcattcctaattcttttttgctgcatattttttatggagacataatttacaccccataaaatccactcttttaaagtgtacaattcagggtttttttttaaatatattcacagttatacaaccatcaccactatctaattccagaacgtttccatcatcccaaaaagaaacacctcacctgttagcagttgctccccagatctcacttccccggcctctgtacaccacaaatctactttctgtcactatggatttgcctgttctggacattttatatcaatggaatcataacgtacgtggccttttgtgtactgctccgttcacttagcacaatgtcctcaagatttgtctatgttggagcaggtgtcgatacttcacgcttttccatgactgaataatattcccttatagagacagatcaggcttcccgggtggctcagtggttgagaatccccctgacaatgcaggagatgcaggagatgtgggtttgatccctgggtcgggaaaaacccctggagaaggaaatggcaacccactccagtattcttgtctgggaaatctcatgaacagaggagcctggcaggctacagtccatggggttacaaagagttgaacatgacttacaactgaacacacacacacacacagatcacattttgtttatccatttgtctgcgttgtttccactcttttggcttaagcactttactttagccttcagtgaccctatggggaggtgctctcttttcatcatataaacaacaagactgacatccagagagcttaagtaacccatgcaggtcacttagctagtgagcggcggtggtgggctttgccccaagagtctggctgcagagacagtggcctcaaccactgagcatcactttctcttcagtcagagtaagatagtataaatcagcacccacagcaactgtgccaaaagtggtacccacagggcacttaacagagggtggcttttctcagcagcatttctgacactggcagagccagggtctgccaggcagggcctgaagctggagcaagagtgtctggacagccagtgataatagtgactatctcagtacacgggtggttcttccagcaatggggacatctctccacacttggtggggggccgtgggcactgactcctctgctgcacatctctggcctgcaccccagagcccatctctcctcccacctccacctacaaagtcatggctcccctcctgtccccaaggccctgacactgagtaaccgaggcagcattcttgggtgaggtcaaggtcagagctgcagtggaggctgcatggacccttgaatgggtctctgtctcctcaggcctccacctactaaataattagataagaaatcttaatacttccttttttaattacaaagcaatttaaataggacaatatagacacaaaggcttgtggctttaagataatgaaaagactataggaacatctaaaataaaatgtctcttctgggcctcccactccaaggcaacgactctgagagtggggtaaatagccttttttttttctatgggttcagatatatgttttctatctaacgttttagaggtattaaaaataatgcacggcaacataagtttctctactttacaaccttttcttctcacaccaaaggcatctttccagaccaatacaaggcttttaccacctcttaattttaacagctccacgtggcccttgttaaggacaggcagttgtcacttgactgtccacccactgaagccttttggatggcttgcatttcttgttttcataagcacactacagtaagcacctggtttatacatctttgtctgcagaggacagatttttagacacgaaatttctaggtcaaaggatgagcacattttaagtattctgccgagaatgagattccaatttgcattcttgttcccactgggtatgagtgcccttttcctcacaagccttccagcactgggttttatccatctcttatcgtttgctgccctggtagcaaaaccacttcttcataaggaatacgatgtgcaaaagagctttgcttgatgccacccagggtgaggagggtgaggggtctggagatgctccaatgtctcactctgtcccctggtgcaaagaactcctctagggacttccagcactgctctccaggattctgtttggctctagggctctgtctctcagttccactcaggggttggccctcagggagctaagaatggaggaggggctggccagtcttcctgctcagttggccccagcctcccctaatagatgtgtctttgagtaggcgctcctggggacagcatcatcatgggaaagcgtgtgtgcgtgttgggagcggggggactctgggcacctgaacctgcagatgttcctaatgggggagcctggggcatcctggttccctctcagcctgccatccaaactcacgttttggaaaagactgaatctggatcttgcctctgcccaggtcttgctgtgtagacccaggcaggtcactgtcctttctggactccaggctcccggctgccaggctgggggaatccctttacagggtagatgccgaatctgctccctctggagactccacactggccacaccatgcgcatgagtcacccccaagttggcaggctgagggcaggggaggggcatggaggcaagagaagggaggctcgctccagatgactttggtgccacatggtgagtctggcgcagtggagtcttgcctggctaacgtgagtgtgtgagcacaggcacacagggcacaccgacgtgtgaagtgcattcttgtataccgaccggggatcctcctgctcaagtctgggcattcaggtttacagctcaggtgatgagtgtccatacacaatccatgtgtgtgcacattcttgtgcgtgtcaacacatacacgcatgtgtgcctgagtgcccctgagcttgtaaatcttcacctggttgtggctgcctagatgtgtctgcatgaacgtgtgaaagtgttagttgctcagtcatgtctgactctcctctgtccatgggatttcccaggcaagaatattggagtgggctctctggggcattttcccgacccagggatcgaacccttgtctcctgcattgtaggtggattctttactatctgagccaccagggaagcccagatgtgtgtgcacacatgtgcctaaatccgtgtgcatgcgtgagggtgcaggtgagcctgcaggatgtgcgcacacgtctatgattagagattacgggtgtgtgggtgcacaagtgtcacaaacatacacactaatgtgtgcgtttgtgtctgagcacatgtcaaaacacatgcatagagtatccgtagtgtagatggagtgcgtccacatgtatgggtctagaagggcttcagtgtgcatatgggcacagctatgtatgaactattacagtgtaactctgttgaagtgaatacacatgagtgtacatttgcacccaggaggggccacctcagcgtctgcaaactatgacatctcctccagggcccatcccacctggcctggacctctcccctcaacccacactgaggaaccaacagaaggacagtgtcattgctttaattacaggaagactaagtattttagtaattagtaagtcattataaagcttactgcttttaagaacaaaaatggctatattatagatacaaaatgcatatggaatctgaacaagaagcatggaagtgcaggattttccaccccaatctgggtgggagggcttgaagaccaagtatacacagggctcaggaaggcaagggagggagaggccagagcagagagcccctgcctccatttccaaggctgtccacacctgacctccatccctacctccatccagcgagatatcgttctgggcccagagggccccaaccctggcctgagtggaagtcagggagtgagtgtgtcagaccacctctgacagcaaccagtcaaggcaaggcccttctcattctcccttccgtggcctataactctaagatagtcatacctacctgggttttctcaaagaacctcaaaatataacctccaacacgtgcctacctccttcatcctcccagaacaatttctacctcccacccccagctcctgtccttctctcttggcctgcactgcctccttgccacaggtctgacccacaaacttctactcattggtccaaaaccacgcctgtgtcaccacccagctgtacaattgtcatcccagctggactgtgaactcctgaggtagggaaggctcaggcattcttgggtccccagagcccacctcaacctggcacagcttagatatcactcactatctgattttagaaactgagataagaggagaagaaagggagagcccctgggcgcagcaacgtttggtaaacacggcaggtcgttgggtgccccaagactggatgagtcagcctgacccttgccctggaggaggaagaaaaagtgtcatttatcaggctccacctggtgccagcatcagccacacacttgatccccaccacacacctgagaagtaagcaatatttttactcccattttatagatgcagaaactgaccctcacagaaagtgagtcagcagcagagctgggactcaagccttcctgactcagcacttcctacaggctcatccccccaggttctttctctctgnnnnnnnnnnnnnnnnnnnnnnnnnnnnnnnnnnnnnnnnnnnnnnnnnntcctcaggaacagcccttaatcataaaggattggggtggtgggtagatacgccagctcacttgcaccatgggtggagcaactctaaggctgcttccacaccctctcccggaggtctctggaggggctaagccctgtttccacctgttgctcattaacttgtctgtattggctgcgcttcctttctcccttccacatcttttatggatcttagaaccacctcgaaaataaactccatgccctcgaatcttagtccaggtcctctctggggaccccaacccaagaccaaggggcagcagccacagggactgtgagtctgggaaagccagggggacattcttgcaaagaggcctcggccacagaggcccagagacacatgcaggtccagacccatgggatgagccctggcaggcgggaggccagcctgactgcagctccagagctgcacacagtgtcaggctggcgcatgaggacgcaggagcaccagggtaaagagggcacgggtgtgagcacagcagctgatggcaacggggtttatctcagggcccaagaccacacccacacctccctcccttctgcagaaatgggcctggaacacctgtgccctggcaagccctagggtagaccccggctggaaaaccccagggctcccagctggccttctactgctcagcacctctggcctgggtcctggcagagcagggaggctgcctggggaaggtcttagatggcaaatctgtacaattctgtgcctctctgtccttcccattcaagaaatggcacagggccttggtagggccgaggaagtgaatggagggatcccagcacctcagagggcccctgttctctgactctgccaggacatagtttgcacacagaacattagatgtggcatatcttgcttccccacgcttttcagaagagggtgggcttccctgatggcactagtgttaaagaacctgactgccagtgcaggagatgtaagagatgtgggttcaatccttggatcaggaagatcccctggaggaggacatggcattccggtactcttgcctggagaatcccatgaacagaggagcctggtgggctacaggccatggcatcgcgaagagtcagacacgactgaagtgacttagtatgcacgcacattacttaacccagaggaatcaagttctaacggtggaaattcaagcattggaaaagacatggcttgattttaggagttggccttccctcaaatcacaccatgtcaaatctcagacaggcagcatcatgaagcagaaaaggcacaggctgtagagccagacagacctggctcaaatccttggagacagaaaagcccctcatcctgagctttggcttccttggctgtgaaataagttgacagtgtccactggcgggagacctggcttcagtccctgggttgggaagatcccctggagaaggaaaaggctagccactccagtattctggcctggagaatcccatggactgtatagtccatgaggttgcaaagagttggcactactgagcgactttcgctttcactttcactggccccaggtaagcatcttcaatctccttcagtcctcagtctggtgaggaagtaactccagagatgagcagatgggcactaaggcggccaactcctgctcaggtgggtccagagtgattcagaagcctgctgccccctgccaggggcctctgaggctgggctgtgccctgtccacttcaccctccccctgtgtggcccagccctgacccgagactcacccactgcccggtttcggcacctggcccacagttagccagggctgggtcttcagtatcaacattcctctgggataaatacctttggcctcaggaatgctgggaactgggccaagaggtcaaagggcctggactttatcctgagaagctcttaaagcctcacagcacctagacgaggcaggcgtagcccagtcataaagagaaactgagagccactgatttcatccaagaaaagaaaccaggggcctccttggttatcctccataagaatcaggacagcagaagatgaaaaaaatggactcaaagcaagcaacagactggaaattccacttctgggtatttaccccaaaggagtgcctagatatgttcatctgaagatacatacaaggttgttcacagcagcattgtttataatagtctcatactaagtgaagtaagccacaaacagaaagacaaatatatgattttccttatatggggtataagtgataccccatatatcgcttatacaaatgataaaaatgaacttatttgatgaaaaaaatgatacaaatgaacttctttgcaaaaccgaaacagactcacagagaacaaactatggtcactggagggaggagttggacatcagcatgtacacactgccgtgtttaaaataaataaccaacagggacctggtgtatagcacaaagaattctgctcaatacagtaataacctaaatgagaaaagaatttgagaaagaatagatgtatatatatgggcaactaaatcactttgctttacatttcaaactaacacaacattgttaaataactataggtaggtaggtagatttagttgctaagtggtgaccgaatcttgcctgccaggttcctctgtccatgggattctccaggcaagaatactggagtgggttgccatttccttctccagggatcttcccgacccaagaattgaacctgagtctcctgcactgcagtcagattctttatcaactgtgctatgagggaagaaaactccttaatgtaattaactatagttaacataattagtgagtgaagtgaaaattgctcagtcacgtctgactctttgcaactccgtggactatacagtccatgaaattctccaggcaagaatactggagtgggtagcctttcctttctccaagggatcttcccttaactagaagttaattaactaattagaagtaaatataattaactatactccaatataaaatttaaatatatactagaatgttcatagcagcactgtttataatagtctcaaactggaaactatgcaaaagggcagcaacagtagaatgaataagtaaattgatccctggtggctcagatggtaaagaatctgcctgcaatgcaggagacctggattcaatccttgggtcaggaagatcccctggagaggggaagggcaacaaactccagtatttttgcatggagaattccacagacagaggagcctggtggggtccttggggtcaaaaagagttggatacaactgagcaactaacactttctttcttcagattgaactacaactgataaaatcatacggatgatcttacaaatgaaacaagattccatcctttaagattccgtatgtctatatctatatccatgtatatctatatatctccagttttagtggtgccagaactcagcaaagtgatttcccttgggggaatgagggcaggcagtgactgaaagggaactggaagggagcctttggagaagcagtcatgttccattttttgatatagcttcagggtgcatgggtgttcttgttttgggaaaatccttcaagttgtacatttatgatctgtacacttttctatatgaatactatgctcttgaatcttgtgttggaatcttagcgatatgccctcttctacgtatggcctcttttgtgcaacattgtatttttgacattcatccatgttgtgacatgtaacaagatttcttctttttcactgccatgtagtattctattacccgaatagaccacaatgtgttcatccattctactgttgatggaaggtgggttgtttatggtctaggagctattacaaattagtgctgctttgaccattttttgtacctgagttttgatgaataaatgtacatatttctgctaggggtatacctaggggcgggatggctagctcatagaatatatacatcttcagctaacggcaccccactccagtactcttgcctggaaaatcccatggatggaggagcctggtaggctgcattccatggggttgctaagagtcggacacgactgagcaacttcactttcacttttcactttcatgcattggaggaagaaatggcaacctactccagtgttcttgcctggagaatcccagggacagtggggcctggtgggctgcagtctatggggtcgcacagagtcggacacgactgaagcgacttagcagcagcagtaatgctttggaaggaatggtgctaaagctgaaactccagtattttgggcacttcatgagaagagttgactcattggaaaagactctgatgctgggagagattgggggcaggaggagaaggggacgactgaggatgagatggctggatggcatcaccgactcgatggacgtgagtttgagtgaactcagggagttggtgatggacagggaggcctggtgtgctgcgattcatggggtctcaaagagtcggacacaactgagtgactgaactgaattgaactgaactgaatgattttccaaaatgttttaccattttggacttccatcagctgtgtatggcagcctcatattctcactagcacaagcacaagcatgctttgtcttgtagccattcaggcaggtgtgggataatttgcatttccctgctgcctagtgaagttgagcacctgtcttagtttgggttccctaggtggcgaccctgagacaaggatttgagagcaagaagtttcttggcaggtgtgttcgtctcctaaggctgctataacaaaataccatagactggtgtcaaaacaacagacctttattttctcacagttctgaggctagaagaccaaggtcaaggtgccatccacgttcgtttctggagaggcctctcttcctgccttgcagatggttaccttctcaccgagtcctcacatggttgcttctctgtgcatgtatagagaggcggagcaatatttctggtgtgtctttctcttgccttcaatgtaaggacaccattagggcctcaggcttatgacttggtttaaaccttaattatctccctaaagacctgatcaccaaatacagtcacttgggaaggtagggagacgtgattcagtccatcatagcaggcgatcctaggaaaactcacaagggagtgaagaagtgacagcatgcgggaggaggctctggaagtgcgtgtccacaagccagttgccaccctgggcatctggagttgaatcccacggggagattctgagaaaccacgtaaaccacgccctcgagagttatcccactcagggcgccggggaggtggacttctatacatcgactcctgccggtcactggttgaggcctatttcaaagtatgggggtgtggggtgggggcggtgatgttagctccctggtgcctcccaggctcacagaagccctgaggctcggagctgcgggtacacaggccacagcacgtcctcacatgctagtaacggtcgaatcctcacttgagtgaagtggttactcttttgaagctgagttttgaaggatgtatacagatgggccaggcaggagacagcattccagcagagggaacggtgnnnnnnnnnnnnnnnnnnnnnnnnnnnnnnnnnnnnnnnnnnnnnnnnnnggtcttccagggccccccagtcctctgactctcccaaatcctgactatgtactgcaagcaccactgaatgccagaatgtctcccatagccagagacatagacgaagttcccagcagagaggctgcaagccaggtcggggccggagcaaggacaaagggaccagcgttcccagggcaacagaggctcaggccacaggatgggcatcagagaagtcaaggcagatctcaaggttgacattaacaaaggaccttgagctaaggtatggggtcctgaagccctgagaaaggcccacttatactcacccccatgccacctgagttcagactgtgctgatcctcctcagtgtcctcccaggtccgaaaagctgtgcatgtttacactgtctgcagagcctaaaccaggaaggcagagggtcagggagaggcgggcccagggctgtgggcttggatgagaaccccctaaccaccattttgacctgaggggaactgggaagtgggaacctaagacaggtctgagcaggctctgactgctctgcagagctatcagcttggagtccagccacatccagttctgtatccaaataacaggcatctcatctgcagaagtataacctggcagggcccaggcatcgtgagtatctgtcagtccagccacactttggcaagtcatgtcccccctactaatcctgctctgtgtggcttgggtggggcagtctccccacacccaggcggcgggcttgtgaaccatgcctggccaaccatgtccccacccccaggtgccgtgattgactcaaggataaacccaggaccctacccaggccaacaggagtctcccttgagacttttactagcgatgtctggaaactctctcatctgctgagatcctgagctgtaaagaagagatgggaacagctggtggacagcttgcaagatagagaaaatctgcccagaataaaagaaagaaagaaaaaaaaaaaaaaaaaaaggcaggcctagctggaagatggagagagagagaaagagtctttgtggtgtcaattaaacacctgggtgcagcatgtctgaagttcctggactcctcatttgcatgagccaacacatttcctgctgcgtttatgtttcatcatggtttctgatgcttgcagtctgaaaggatctgatgaaaatactgggtgagaacacaaccagtgttcctttctgcaccttcatatctcagagatgtgcacggagtttctttaaaaagggcctttgcgattggaatgttgcagtgaggccaagatccctgtcatgctgcccttctttgccaaatgacaactaactgactcaaagtggagtaaacactgccaacagcttacattcaagagttcaggatgctactcccactggaagacctgtcctggaaagctgccctctgcctgactccccagagtattctggaaggtgcatttttctgaccaacagtcaggattaattactttttcatttgttgaaatatgggggtcagagttatatagacttaagagagagggaagaaaatagtgcatttttgcaactccagcctgaatgggcaatattgcacgttgcacgacttgatttgtttaattcaatgaagctcgacaatccacccaaatgtgtttaaccataggggtttggttaaataaattataatatatggattaaaaaagaagtaaggtagctctgaaatataccatcataaaaatatgtctcatgtatgaagtgttaagtgcactttgcacaatcacacctcaataaagtgaagttttttcaaaaatcaatttgcccaattatatgtataacatatgcccattaaaaaataatacaacagtcctataacttgcaaaagtttgtcatttatatgattaggtgggggaggtgggcaggaaaggaaggcgaaaacaatttgcaattaaagtaactcactctccttggatgattcagtccatgccagctttagttccctatcagagctatttccccttcacaagctatttcccaagacggaaagaagtataagcttgggaggctatgaactagaaacttgggcgtctaagaactagaagctgggatgtctttaggacttcagggaagagttcctccctggcctcacatctctcttgtaagaatgcctcatcctatgggttcagagtctcagttttcatcccagctgccattacctgtgcagcaggcagagcccagggctgattttaaccttgcaaagactgtagacgctccagaagaggagtgctgatcaggatccctgcagtctggctaggacttggggacattgtgaccctgtccagggtcctgactggcaagtgacacaccagaactcagtggctttctgtgtcccctgaggggctgggaaatcaaggcaaccccttcgcatcacacaggagacaagcgtgagactagagggtaccattcctggtcttctctctgcctgaacactctgtagtggcttgaatgctgacccctcagatgatatgtccacatccgaactcctagaacttgtggatgtgaattggccaaagggtctttgcagatacggggctgccctgatagctcagttggtaaagaatccatctacaatgcgggagatcccggttcaattcctgggtcggaaagatcccctggagatgggataggctacccactccagtatcctgttattcccttgtggctcagctagtaaagaatccgcctgcaatgcaggagacctgggttcgatccctggttgggaagatccttggagaaaggaaaggctgcccactccagtattctggtctggagaattccatggactgtacagtttatggggttgaaaagagtcggacacgactagtgactttcactttctttgcagatataattaaattaggtctcaagatgagatcatcctgaattatctggtggggggaggctctaaacccaatgacaagtggcctttcaagagaaagtccaaggaagatgtgacatagaagagatgagagatgactcagaggagaagaatatgtgaagacagaggcaaagactggagtgatggagccatacaaaatgccaccaactaccagacaccagaagaggcaagtaacaggctgccccctagggccggagcatagccctgccagtactgagatttcagacttctggcctccaaaactgtgaaagaataaatttttaaaccacttgttacggcaacccaagaaactcatgcacatttcctgctctcctttctactctactgtgggtatggaccaaatagccctccagacagcatcctacagagttctagaagtgggcagaagtcccctctggggtttctagcttttctacaaccgctcccaggctggggctcagagagaagggtgaggcacaggcagcctcttggcatcactctttcctcctacgaatctgtttttccagctctctaatggctcctctgagaaatggaagctctgcctacattattccgagctgggcaggcatttcaccctgcactgcaccataaattctttctacccgtgccttacagtaaaactccatgttcagtcctccaagtttgcgcctggcatctgcaggaagtcctgggagcagacaactctgctttctctcttatagtaggtgctgctgattctctacccaccttctctttccctgctccatctctttaaaatgacccagttttcattccggagtccatcttgcccttacatcacccacgtgcttcaggtgaggctaaccccaacctcagctctgggggctgctctaactggtggcatggaatctatcccacgtggtccagaaacccaagcctgagtgccagtgcagggcacctctccggccacagaaacaggcatgcaacaccagccatgatgccaagggaaatatactgggacctgctggaaacaggtatttccttgctgttagaaggatccaccagaagggacatgttctccttttcccttggtgtcctggtggtgaatgtctggcaattctgaggggagccaaccccaggatgaagccatcagacagagcatagccaaggggctgctgagttctaggccagagttgctggattaagccagtcctgaagcccaccctgtctctggaatctggttacctgagccaatacatctcattgttgaagccactgtgtcttagacttactgttacctgcatcccaaagcatcttgccaatataccacttgccacagccagttttttaagactactgtcctgttatgggttttgagatcctattttgggagtcaaaagctaactaagcattgttccttattcctcttacattattattgtagcaatttttaatcctccctaaggcagatggatgcctctggctcaataggaggaaaattcacataaggaagcttgagaaaaaatacacgttactgtatttcaaagaaatgatccacattaccctaacattcacacaaaaaacctgggggaagaacttctaaactgtgagcaggagcagctgaagaggacttgggggatatgtgtctccctttctaggctagtatcactgtaatgtttgaatttctagagtaagcatgtattacacttgtaatttaaaatcctgaggattagagtcatctgaggcatccagaattccccaggtaccgtccatggctcagctgtcaatcctgcagaaagtttatttgtggatcagagcaatgacttaagaagaatagtcacaatgtttctttacaatttagactttttgtttcaacagcgtacactgatctagctgagtgcatgttccccgccacaggaaacccttgccaaatctgtgccaagtggtagttaacaggactttggtgtctcctggggtcaggagaggggctgcagctctgagtcagccacagtctgcctcctcccttccaccccaggatctctggcacaaagcgcccatgcctctgtgaggtctgaagggcctccttgcaaactccaatcctgtgtttatgctcctcctgcaagaaggatgccacctcctccttggacagagatgaggaccttcagtatctccagaggggtctccagactctgggggccagagaccacagcccagaccccagtgccccgagagccccctgctctgccccagggtccccgtcactccctaggggttctcttctcggcttagtcctgatgcaatctccaagctcaactggcctgtctctgtcatttcccccaagctgataaagccagaaacctcagagtgagtggaaagagcctctgccctgaccagaagaaaccgcagggctgaccccataccccacagtaagagctggagaggctgggctctgggctcaacgcctggggagaggaggaagaaagatgaaagagctgaagaaaagaccatttgctatcacccgctcacacctgtccaccactctctcttccctggatctttccctgtgcttggtccctggactctgtccctctctaaagcttctggctccaggatcagaaaaagcctcagtgcgagcctcagttctagaatctcaactctcagaaaggctagtatagggggcctcagcactcccctgcccagacatgcctggggtaggtctgggattccttcatgctcacctcctccattaagggctgggcacccactagaaggcatcctgttccccatgggtatccagaaccctcaaatgtcccaaacctcctcatccaccctcacctctgcctggatgggcagtagataccccaggtctcttgccccagtcagacccctatgcaccaggccctgtgctgggcatcaggttcagagatgaggcaggtccctgctgcaggacagtggggggcaggggacagcaggtgggccaatggccagatgaaagcagtcacagtaactgccagctgctcggcccgatgccagctggggacgtgatattgaatggtcacgagccccttccccaacaagcagttcaagttcccagcagtggtctgtacagaagccctcgccagatgcagcatcgctcagagaggtcctcctggttcgcaggatttaacaagtaacccctgctccacggtcctatcgccctctagcattacgtgctcgatttgctcttccagtcacccactcccatcactggagtgtaagctcttggaggcagtatctgggtcattcttacaccccagaccctgggatgctgtctgggcactcacagtgtatttgtgggtactggatgtgcatgaaaggtggttgctggattcttgtccctccttctaccctatcagtcacctagccaaaccacccccaagacctgcagaagctgtctcttctgttctgtcatctctcctcctcgccctccccagactctaaacccagcctccccagcccttccttggtatttcttaatctctaactgctgctgctgctaagtcgcttcagtcatgcccaactctgtgcaaccccatagatagcagcccaccaggctaccccgtccctgggattctccaggcaagaacactggagtgggttgccatttccttctccaatgcgtgaaagtgaaaagtgaaaataaagtcgctcagttgtgtctgactcatagcgaccccatggactgcagcctaccaggctcctccgtccatgggattttccaggcaagagtaatggagtgggttgccatgctttctccgcctaatctgtaagcccagttcaaacgtcacctcctctgtgaagccagctcagatccctttgtgggcacattgcctgtcacatgatcctactgggcgctgcagccacgtgtttatgtgtctgcggcccccgcccccaccaccacctccactgctgaacagaagatcttcagaactgggctggggcccaggtctctgcgtccagggcttctacagagaccagggctgggcataatatcagagctcaggaacgatctgtcagatgaataaaggagtgagtggagaaatgaatggatgagcccccgttagtgagggatacgtgaaggagcaggcggatgcatgaatgagcaagggaagaagctaccgagtgaatgagtcagtgacttggggtgggggggagggggagtgagcctgtgaaggagagagagccgtgagggtttcagtccgctccagcagccctggcagcagccagcccccgccacccctgggcctgagctccgtgccaaccagacctcccgatgcctcctcccagagccagctgccgtcagcaccgctcagcacgcgctcccgatgctggccagcccctgcgctgggccatgaatcagacagggcactgccccagggctcccaggacccggggcagacagacagcctcataaataaacccgatgccctgctgggcagacatgtgttccagcagtgcagtgagctcagggttggctctggagccggggctggcagggcagagcctgatggagaagcctgggagagcctcaggaagagggacctcagggctgggcctggaggagaaagggcacccggggcaggagggctggcagcagccaaggcacagtggcttcgacagacacaggagtgcagggggagggcgtggtggaggtgggaacatggggaacgcagggcctgagtggtggggtcaagaagttgggattggcagagccagggctggggacacagcaggatgtaagcagagtggggcacaaggactgcgggctggcggtgctgtatctcagaaggaaagatgggaggctatggggaacaggtctgtgagtttctagggcgctcagggctgtgtcctgctatagctgttgcataattgagcttctggcttctctccacaaagtcaccatcatcctcccagccctaatactcaccaccagcagcttgaggctttggagcacccaaattagggaggttactttggtgagaacacttccaagtgggtgtttttaagccaagattgttttataatggttcagatcatggggaagatcctggggtttctgaagcaaatcagggaatttcagaatttgacaggaaacctcccagttgaatgggtggaggccaccaattcaaagatgctgagcatcctacagtgcacaggacagcccttcacgacaaagaatgacctagtctaagagatcaatcgtgccatggtgttcaactctttgcaaccccatggactgtaaccctccaggctcctctgtccatgggattctccaaggaagacgactggagcgggttgccattcccttctccagaggatcttcccaactcagggatcaaaccgggtctcctgcatcacaggcagattttttacctctgagccattgggaaagcccagtgtcgaggttaagcaacctgctttcacaggtgggaggactaagacggtgaggatgctagaccaaaaggtggtctccagtaattcacgtgggtcttcatacgtgccaggagctgttctgagaacctacccccattcactcatgtcatctcttcctgctttgaggatgaagattaaagacatatgtgattttcccagggtcacacagctggtgggtggtgaaggcaggattcccacccggattgtctggcttcaaatgctgtgctcttgatcatgacatcccatggtctcccacatcacccagcagctgggacagagctgggcttgggcccagagcccccctctccaggcagatgttccttccactctgctctgggccccaggtccatgtaggagtcttgggctcctccaccaccacagacgtggagcttagcaaccgggactttgatttgtgagggatgcagtgggtgggcaggaggcagatcccagggacagagggcctttgtctgcctgcagatgggcaggggccagttgggtgcaaactcattagacagctgccgaggctgccaaggagacgggagcaattagcgggcttggctgaagccaggaagtggaagccgctctgtgagagctgctgagcctccctgccctccaccaggacccagctccctaggaggcagctgccaagtttatgttcagtttgataatggcagctccaaccatccttacaggttgaacctactatgtgctgggctaggcacattccatatcttgtcttttttcatctataatcacccccacccaccttgggaggctggaatgactaactccattgcatccacttagtcatccttccattcattcgacaggtattcatttattgggtgcctactatgtgccagctctgtgctaggtcccagagatgcagcagccaacacagcagacaaaagtctccactccagtggaccttctgttctggaaggggaagacaggcaacaacaaaaaagaaacaaacaaggtaactgcaacttgtgatcagggctatggaggaagtgaaggggctgatgggaggatgctggggataaaggaatcagggaagctctctctaaggaggtgacagttcacaggggagggacttgggctccgagaggaaaggtgacttttccaaggtcacacagctggaaggtggaggagctagggcttgcctccagccttgacctgggcacctgcctcacaggagcccctgcccctccaccaggccaccatccacagctgtgccacacactggcaccgtatctccaccccttcctcatggcagcctcatgaaattcgtggggttatcacctccatcttacaggtggagaagaggcccagagggggccttcacaaacccagggccctgcaaaggaatgacagacaaggggcttgagcgtcttttgatccccaaacctgtattccttctgccacacctccatccttcctggccaagcacttgacgcgcactgagcgtttagtaggccgataagaaacagatggatgcatggactatggggccttgggcatcatctcctttcagtgcttccatttctccattagagaaggcgagagggtccagaccagcttcaaaatgcccaagttcattctactctgttgacattccttgaggagcgtggtcccctatggagaaaaagatgaaagggactctgcctcccgcagactattctgggcggagcaaactgcaggcagaagcatggaggtgggaaaggaaatggcgaggagtcagcagacatgtttaggacgcggagagccacctggaactcatatctaagtgtccctttccttttcctgcattcttaccacctgtcacctgcatagggtcttaggccaccagagcttcatctcctctcaattccagctcttgcttgagtcccagagagtctcccagaggaggggctgaagcagatcccaaatatatctgtgccaccaactgtgcacagtgtgatcttggtcaggcagctggtcccctccctcagccttggtcttcctatcgattaactggggagacagtgatcagagcaagtcggtagcacaataaaaggtgaggtttatgagcacattctccatgtcaggcagtcatcccttgagacaggcaattttgttatccctgatgtacagataagagatctgaggcttagggaggtgaagtcactggcccagggccacacactaggaaatggctcccccgggggattcacgcccaggtccatctgatgccagagctctgctcataacaaaaagctcatatgaagcaatgccctgccctttgacccacgcaacactcaacccccaggactttactcgtaggaaataatccaagagagccaaaaacctgttcacagcgggcctatttacagtatggcagatcactggaagaaatctgcatgcccaacgacagggctctgttcactttagaaattaggcagcttcagatggactgtggcttactgagcaccagctcttgccagttgctccactgtaacccccaccctaaccctgcaaagtggatgttgctttctgcatcctgggtgaggcctccaagttcagagtgtgaaggattggctgagggctcacagccagtgttgggccagggcatgagtggtgtggccaggcctgttcacagccacaccccaggtagctctgttctacaagaaaggaagctaaggcaagtaagtgacccagtaccacacggctgataagcagagaactggagtttgaccacaggaactgggactgcatactctgggaccacttccccacactgccacctactgactgggaaactgcaggcgagtcatttaccattcccaagcctcctgggctcctcatctgtaaaatgagaataagattgtctgttgcgcatggtgtcaccatgtaagcagtggtaaagatagcaatggcaacactggtaatactgctattcacagtcgataccaccgggacagcgttctgccgtgaaaggaaaccttgcctgaacgttagaaggactggctgcaaacctcagctaggacacgtctcaactctctctgggcctcagtttctccatctgtaaaatgggggagggcacacttgagcatgtctccggctctggtggtctctgagcccaggaacactgctatctcgggttttccctgggactctgcctgctgacccctcatcacacactggtctgggggagcgggggcgggacgcagtgggtctgggcttgaggacacatgtactggaggaggacaaggggcccttggacagggaaatggaggttaagtcaggaagccccaacactcagcccctcaacacacagcccctgctcctggcctaagggccactcaggcagcatctgctctaggtcctttgtacctctgcatgggacctgcctctgccccacggcctcagtctctcccctccctgccagcccctcaaggagatgctgaaccttggtgaagagaaagcagaggaaggcaaggaaggaaaggctgaggggaccaggagaagaggagaaagcaccctgagaaggaggggtgaagagcatggttttacataatggatggtaggggtgggatgagaacgaggcttgggacggggtagggaggaagaagaagaggtcaacagaggggctgagagggtctctgacatttttcagagttccctttaccaaccctggtgaccttcgggtgccctctctttatgtcctgctgactggatacactgggagccaggcctttcacagaggtcatgccagccctgagggcaggcctcccacatggctccagccccataggcggccacacagaagggccaagggatgtttgcgggacaaaggacttggttcactctcccaaaggctctgaactgagaagaatgtagacatcatccaatccacctttcctcacctgccgccccaccccacccccaccaagggaggaaggactttctcagggctccaaggtggggatgtcgatgtcagggccagaaccggaacccagtgtcctgtgtcttgggcctttctccagcccagccctggagggtcccagcagcaggaagaatccctgcctctggttctggcttaataaccagccacgaggcggggctcagggcctgcggctcagctgccagtctccccaggttgcaagagcattaaatggcctcagtgatgcacagctttgactcctgagcaggcgaggctggtggcagagaatacactgatgtgacatctgggggctcctgggagcctgagccccggacaaacctccaccagcgtctgaggaacctcaggctctgcagagtcagtggcacagaggcccgcagcatccttggaattgaggcctggtgtggcagaaagaggagaggccagatgacccaccgagataccccagaggcagcaaagctgagagacacagccagctgcaggttaagagctttcaaaaactttcagctacagccaaagacaggagatcagtttgtaaacagacaacaaaatcccacaacaccctcagatatgtcctaactcatctctctgatgggctcagagctggagctggcctgctcagattcctcatccctttccaagaaaggggcagcctagccttggacttggagaggccaatgccttcctcaggccagttcttctattccctccccatccaaatgcatcaacaaatcccctctgggtttattttcttccctccttccctgcaggactccagcctcatcccatcagtggtgctcacccttcctcccaaaccctccctggctccccatgtcaacaaggtggcattcagactacttgacttgacattcaagtgtgatctgctctctgacctcaaaccctactgctcccctctgccccaaccatgactctcagtcttgggatgttcttgccacaggaactgcacattccaatctggtagtgggcatgcttttcctctgaatgcaggtgacccatgcgtctgccccaatcagtggggccatggtagaggggactctcaaccctaccacttcctggaagtgtgaccttggggaagggagtctcacttttctcatctgcaaaatgggaatgctgatcccttcacgggattcaaaggtctgggcacagtgcagatcacagaactattattagctattatttagctattattggattccctgatagctcagttgataaagaatccacctgcaatgcaggagaccccagtacaattcctggatcaggaagatctgctggagaagggataagctacccactccagtattcttgggcttcccttatgactcagctggtaaagaatcctcctgcaacgcgggagacctgggtttgatccctagttgggaagatcccctggaaaaggctacccactccagtattctggcctggagaattccacggactgtatagtccatgggtcgcaaagagtcagacatgactgagcgactttcactttcactttagctattatttatcaggatcagtgctgttattacttcgtgcggtcccacacagcaaacatcctaagcaccgggccactggcaggccccaagtctgtcaaactaacctcacatgataatattagaaacactcgcctccatctcaacttgcatatgtgaaactgaggcccaggggcccaaagcccagctaacagcagaacagaccagaagccacatctcctgatttccaagccagaactctttccctacaagctgccactactaaaagccgagttcagacgccaaactttaattgtgatagtctcagtttatacaagaagaaaaacctttgctccatataagaatctttattatttattctcacttttaatgccccaccttgaacattcctatgtaccttcagagaacacccccctcctcctcctcctaggcaaagctcactcctccagctgctctttctccccacctcttttctctctccatccctggggaagcctttatctgaccttccctggcggagccaaagggcaaatgctggcttgcctttttgctgctcagctaaaaagctgactgccttttctcactttctggattgtgttgttgttcttagcctcaagggtctaccctgtaagagaaaaccagaacctccctctccaaagcctttatctattcccagttcctcccatcttaaaaaacaaccagggaccagacaaagcaaaccttcttctaccctcttctccttcagtctggcccggtttcttggtggtgacctgttatctccaggctccatctccttggcttcatctcctactcgccaacccatggggttgcctctgctgtgtcttctgttcaggtctgcagcgactccatttcccccaggtgtgctgggctctgggtagccttcaatctgcctgatctgtctgcctcagtttcctctctgagcgctgtctcctgggggttgtctgacactgtctccccacagccctgccagtaacttctcaatgccctttgttgggctcctcctccatccaagccttgacattctgtcttgggtcctcttgtcttcccatgctccttcccttggcctccttataggctgaatttccatctctagccaatgattgctagagtccacctccagcccaaacttttctcctgaggcccaggcctgggcaccctgttgcctctactggatgtctcttgtctttttaatgattatttatttgtttatttggctgcactgggtcctagttgaggcatgtgagcgcttagttgcagcatgtgggatctagttccctgaccagggatcgaacccggattgattgattgatccaggggtcaagacagggatcaaactctccattgggagtgcagagtcttagtccctactgggtgtctctaaggtagcatcaaccgagcacatctcaaatcatctcatcattttcttttgtgaaacccatctcccctcccgagcccccagctctacattcagccccaccacccaccctatctttgaagttgaacacctagaagtccctgatgtgtcctctttctcacccccacacccagtctgtcaccacaccctgctcagtccatcttccagaagcctgtacaacctgtccaggcgtcctgagtccaccacctcgacctcaatccaaacactccacttctcccctagtggagagtcctaacgggtctctcaaagccacacataccctgtactgcattctcacagcagccagaggggtctttctagaacacagatctttccatgtcatttccctacttaaaactcattactgtctgccaaatgttctccagtgaaacctccagatgtttggcgtctggtcgcaccctccccacccaccccccaaacccggccagctctctgagcacaaaccactctgtcttttcagctttttctttcaatttgctgtatttcttcctgcctctgaggctttgctgttgctgttttctctgtccagaatgcttctccttcagcatccccaccaacccatccttaagagatgaggccaagggttgcttcccaccttccccccagggcctctaggatttcgacagctgccaggctgtttgcgctcacccctgggagcttgtggttgcttgattcatgtctgtctgggctcctggactgcaaatcatgaaggccaggggccatgtctgtcttgctcatcctaaaaccacactgtgccaggcccacagcatcccacagccccacctgcccaagctacccccagtccacaaagccagcattaactgccccagagaccaactccaggctggaattcaaggcctcacccttccaaaactccccatccttaacccctcacacacaccttccccatccacactggggagcctcctctctcctccctttgctcccccccatttttccttcatccttctttctctaatgatattcaagctcaccattctccaatgatgcttctgttccctgaccacacagcccatcttattttggattgacaggcatcctccctagcttcaggatgaaattacaaggcacttgaggttctccataatctggctccggcctacactctcagatctccaccacccacacaagagtaatctggcacaagaggacttagccgttaaaggattcttggcctttctggattcaagccctgcttgcacttcttacaaacttcaggatcttgagcgagtactttgctaaacccctatttcctcacatgtaagacaggaacagttaagagtctccacctcattgaattctgtagagattaaataaggaaatccacaagaagtatttagcccagcacttggcaccaagaagctccaagctcctttcctctatcatggccctaattggttaagaacctgtccttcccatgggtcctatgttcagaggggatcctgggtgcctttcatctctgtttcccctttgcctagctcagtgcctggtcccaagaaaactcaataaatgcttattaatgcatagatagaccacacacttggcacaagtcatctcattgttcttcactttcatgtgtgtaaatcttatctctcctaacagagtttgagcttcagggtatgggggaggtggtgctgggagaaggtggtgaggtgtcttcatgtcagagcatccagaatgggagggatctctaagctcttgacatccctgtaccccccatggtgcccagcctggagcagggagtcatgaaggccttgttgacagatgggcctgtcatattccccaagaagaaggcacgtctcccgctccgagatatcgccctaattactccctggtccctcccctccacacacacatcggctttcttaggcaagagcctgcttgacttacacacatggagttcttttagctggtggttctgagccagctcagccagtttcttcagaaactacagcagaaagagaggaaaggttttttaaagccatagggcacaaaaccagagtgagggatgggtgaagtttccccagcaaaaggccagcaatggaccagcattggtcagatcatctcagcactgttccaaaggcaaacctgatggcatagtagaagggttaagtgtgtcgggctctgcactcagagactctcaggtttattccaggctttggccctaaccttctgggtgacgctgcacaattgacttaccctttctaagctcagttcccttggctatagagtggggacaatgttagtactaggaggatttaattagacaagatatcaaagggttggctatcactatgattatgatgatttttgtcattattattataataccattgaatataagatccagaaggaacctcaaaggtcatgtgagaggagagaacactgcagccagcagaggtggcctgactttgctaaaacatacagcagatcagtgcttttttctttacctctttcgctgacatctttcagagaaccaagggagtttgctcacttacccctgaccttggagttggtcccctaccttgacttgaagaacacagatttgggggtcttgaagccaacaacgaccaaaaaaatgggcattgttttcaccaatgggccctcgccagttggaggtggcccagccactgctgacaccatgctataggatggagcatggcctctacttgctatccatccttgaggaagggactgtgggctgggttcactataggcacagcctggacttgggaggcaaggcactgtctgctcccccttctccagctgagttctgcactctggcctctccttagcccggcccaggggctctgcctgcccacctgcctgccaaatggaatccctgcttccacccatcccaaatgcctcttccccactgccctccctctccctgaggctgggaaagacctggctggtccatctagaggatggcactgggcagggggcaaggcttagggagctgtggaaggccgctgccccgggtcaagaaggcaggtctccagcaatcttcaagggaggtgtgctctcagggctgaaggggagcccaacagcactgggagaaaaacaaaaacaggaaggcttgccatccagtaggcagctactctctccttggctcaaattacatgtcattccagtcaatcttggcaatagctccttctccactgggtggtttgtgagggcggagtgggaagctacatccacagcagagtacctggaaagaagaagcttgtgttaggggtgcacggtgagagaggctgccagctacttctctgtcgaagtactaacagaggtgccccttagaatagaccttccttgttcaggtacatctccctcggccagggtggaggaagcacgctcctctcaactccccaaacacaaagccaggaggtccccgtggcctgacaaaggcttctactactccattggctacagagctggcctcagaagcatcagtgggcaaatatgcatggggcccaaaaagcttccatgatcagggcctgcgtggggcacgcatgctcaggcactttagtcatgtctgactctttgcaaccctatggactgcagcccgccaggctcctctgtccatgggatcctccaggcaagattactggagtgtgttgccatgcccttctccaggggatcttccttaaccaggggtcaaacccacgtctcctgctttgcaggcagattctttaccaacgagccatcagggaaacccttctatgatcagcactgtgtcttaaaagttgggataacccattgtctagaaaagactccaaatagctggtcccctctccatgagggaagggagggtctgaaaggaggaccagattcagcacaatgtctgggattttggtaggagagctggttctggcttcccaagtggctgaagtagaagcctctcttggcctggcatggtggtttgctttgaggccaatggctaagaaagtgctaaccttggacccaaagtgcagagatcgcaggagcacaggctccactgaaaaggagaacaagggtccgtgaagctgagcagagcacgtcttccacagcgcccccattgtcagcagcagcagttagcactgatggcctggtgaggactagtttctctcttcctgacactggaagtaggagtcttctcttgggacagagaaaccttctgggtctttctggacaagggacggcaatggcttcagtcaggagacactgaacttccattaaattccacaggcagatatttgagcaattaactggaaaatgaagacttgagaccagtcctcccaaactagtgaggtgcatggttctggttattgcatagaacttgactatctcgttggttcctcataacagctcaacaagcaggcataattatacccactaaatatatgagaaaattgaggttccaaggagtcaaagacacgtgccagttcactcagctgggaagtgttggacctgggactggaatgatctctgctcagtgccccacgagattgaacagaaacctgaggacccagggccagcgcttctcatactgactctttcctatccttcagattacagtttaaccatctcctcctcaaagaggccgctgagccccagaacctgcagtgtgttccccccaccccatgacatctatacatctggacaatatttcttcctttcttagaatattatcataatgatcataacctcatttttacttgtggttttaaaatctctttgatctgcttctctctggagaatgttttccccacgagacagcacataatgtgcagtgtgcaccactgagccccaggcccagcacagggccgagcacatggtggaaccctgtatattgtttgaaggaatcattgagtagatggttaacgggtacttgaaagcatgtcctctttggatggcatgaaaaatcaagatgatcataagagagaggagaaaatccaggagagacacaagaccccatctccaaattctaaagggctgtcctgtaactataggaacaggtggggtgggaggcacaaaactggggttgctggaaagcaggactctcaatggttagggaaactgagcccctttcgaggctcctgccctgtataagcacaccctgaccatctatcccttcctgccccacctgggaaggactccagccatagctaaaggaggcttgtcaggcctgagtggtggctgctcagggactcaaagcaaagcaggttgttggggcgggctccaaggaggaggtgagctgcagggcttcctgggggattatcaggagcaaggatctctgggcagagacatgggtctgtctgctgaaacttgctcagagcagcttctgggcttcctggtcagataattgcaaacaaaatagaccagggactgggcagcagctacaaacccctcttatataagagaagggcctgggctgaggcatgcaggagcaggcagcagggccctgagtcatacaaggaacgagacccattcagaacagctaagattctggcctcagaagctttcagtgatgatgctggtggctttgcctttctctggccgcaggcttcccatttgcaaactgagaaccactggacatccactctgtacctggccagcactggggagaaggaggcattgacactacctcccagacacccaggaaggagcaccaactgacacactctggttcagacccggggtcagggaaaggcagtggggtagggggatcagcagagtacttccagaaagaaggtggaggacccatgctttaagctctttctctgtccctcttaaggaaactctgaccacccagaagagactggaaggtggccaagaaggatctagccgcaactggccagcagtacctgggactcaggtgcctgggtttcctcggggaagtgcacatttatgctcatttgtattatgctgcaatgtacatatatatatatgcaaatcacatatttgtgtgtttgtgtatgtgaatctctatactcctctgtgtgtgtttgcttctaactaggtttaattccaactctatgtgcccatgcatatgtgtgtgcccttgtatgtttctaggtatacacaggagtccaagtgattacgtaagttatacacatttattcattccagatatttatagggtgcccattacatgctacgtgttgtcctagggctgagaatgcagaggaaaaaattcaaggtctctttcctcatgtagtttgcctgcagcataaaagataagcaataaatgagggaataaacaaatgaataaataattgcagattgtgatcacttacatgaaagggaaaaaagcaggataattagagagtgacttgactttacataaagaggttaggaaagacagcttggaaatacagaaactcaggcctcaaacaagacctcctaattcagaatctgcattttaacaaggtccttagagggtctgcatgcacatcagacattaagaaactctcattaacatacacatgacatggaggacaaagggaatagaggcaaatgccacagatctccttctgctgctcgccatgagataatagttgggattcattgatcagtttccttcttccctgggcagaattctttgcccacaaaaatcactcaaggatctgaaaccttggaggccccgcccaactaaggctaccgcagtcttcagctgttgctgttcagtcatgtccaaccctttgtgaccccatggacttcagtaagccaggcttactgtctttcactggcgttccctgtctttctctacctcctggagtttgctcaaactcatgtccattgaatcagtgatgcagtcttcagttaacttttagcctaagacattttccacctctgttactcactgcccccactgagaatcagaaagctgatttccccatgacagaatcagtaaccccagtcacactgaaacccccttttctactagcttgcccaaagacataaggagttttcaatggtcagctggcgttcttaacttccacttgaatgcaaatattcttgcatcctctagtggaaacattccttccttgggcaccaaaacttctgaccccaagtttgaggggcaggtccttaggtgggattgtaggcactgccactgctccttctgctgctcagcccctggccctgtattccagctctgggagaaatagtaccatgtatagccagctgattaagagtgaatacagcatcttataggatgccccttccccaccaccaacatcacagtgtcttttaattccctttggctctgggacctagatttttattaggtcatttcataattttataggtccattgatttcttggtaatggggtacccgggatgaccaatggatccaattatcttcagtccattggcttactcctctccctgtaaaatggatttcttgatctacagcaatgttgtatgggatatcaagacagtggatgaggtattcatagagtctgcagatggttctgctggaagaattatggcaggcaggggaagcagatccaaatccagagtaagtagctgttccaatgaagaaaaattgctgttcctcccatgaaggaaagaatctgatgtcgtctccccctgaccacgtgacagccacagctgctttgtcactgagtccactgagcaagccctggggtgaccaggaaaagacaccaacaggcatccacaggaggtcatcttgaccacctgtttcttaaagccctttcttccagggtcttcaggtttcattcgagtgagtgttcttataggacacaagtaaactcgtgatgttggatccattctgagggtccaatcacatgccttttctccaagcttctctttcaccaacccttcagtcctgtctcttcccagtccctgtccctctgaccaaatcattagccacttcccatacatcactgtagaacataaacctctgttcttccagaccgagacagtgagacacaccaaagtgctgctcactgcggggatttctctattctgtcctccagggatacctctaaatggggctgtaattacacagcctcacactctactagcataacacgcagagccatttgttaagcaggctcagaatgcttttctcctccatacatgggctatagggaattcctgtgagagcgtaagtgtctgctgagaaagatgcagtatccagcaggtgtgagccacctcttatgcaacatgcttgtgctttcaggacctgcttgggtccagaccactttaccacctccactgaaggagggagtactgttgggtgtgctcagtttaatgggtaggtggacctgataacacagttgttctcttggactaaacgattgcatcatagtctatgctcaggtggttagcctctgttagtgccaaggggcaagccaagagtcatttctcaagaggtgaacatttgccagagaaggcatggtcttgctccaaaaatgaagcatctccagccatgatgctgctctctggtcttgccaaaagactccatgcagcatctcaatctgccacaaactttcagtacctttgaatctagtatattataaaaacttggcttgaagtcttaactagctcagatcccatttaaagccaacagcttttttgctcactcaggagctggcttgaagtagaagacacaagtgtggtagatgttgcctctaaaacccaaagcagcccaccgagtgataagtccctttcttagtgatctgcgatgtagagtgtcacagcctattcttcactttgaaggggatattctgaatttcccaggctgatattttcccagaagcttaattgagttccctgtattttctcagactatttttccttcaccatgcctctccaaatacaattgtatttcaagatacttattatcttatgatctctgtgtcctacgagtaagatatcaccaggacgtctctggcagtccagtggttaagactctgcttccactgcagggggtatgggttccatccctggttagggaactaaaatcccacatgatgcactgggcagccaaaaaatcaccagtgttctagatgaatgatgaaaagatcgatgtccctatgaactaactcgttagagggccagacgtgaaattagagttgacacagcatcatggcgaagtgggaggtgcactgctgttctgcctcgagaagtctacacacttttgatgtcctctgattattaccatagaggagtgaaagtattctctgagtgttaggtttgcattaatttgttatagccacaaaaccatacttgaagcatcatgggactataattggagttaccaatatatattaatgataacaatcccacgttaatttttaagacttatctatcttacgcattggtcaaactagaaaattttgaccttagccttaagctttgtggtcccaccaaagaagtgtcattgcactgacttactactttgatgttgtttgaaaacctacagtggctttcacttaggctccatgggtcagggagccagtgtagtaaatctgccaattctggggttgtctattctaactatacacttggaatctgggtaaataaccacagatagtactgctgtgtggtatggaagaggctcagatcaacattccaaattaaaaagtttatcttatccaaataaatccctaatctaatcaggtcagtctctggggtaactgatttctttagaaatactggagtgggttacccttttgttctccaggggatcttcccaacccagggatcgaacccgggtctcctgcattggaggcagaagctttaacctctgagccaccagggaagccccttcattcagggctagtatctactaattctcaaaatatctagggtctttgcctgtactctgttaccttgaaacatgaccacatatccctttggggaaggacaagagaagttttaaggaattaaattattacccaatgtgttattacatagtgtttcttcaagggggtcccctcctcttttatacaacagactgtttctgcttattgactaggggaggttctgaaaattttccattgtgatagttcagcttattttctactcataagatgcatgtctattttattatatgaatcaatatagggcttttgtgggctctccacctcttctggccttaaacccatgatcattaaccatgtccaaaaaataaagagtgccctgttgtttgaaccattccaattaccacgaggctctgctcactatgacggtcacacacccagcctctaacctcgaagtgccaccacatggtctctgccacactacgatcctcccatttccattgacaccagggacccattcagctatggcaggctctgccaggatgcctagctcacagagcacagccattgaaggggtttttcaagggggttggcttttccttcatcagtgttttcccccaaggtcttgctgaagggactcctaggctttcttaggagtcaaagtttagagtaggaggactcttctttcttctgaatttttacatcaagaaattctttcagctcctaaaaccagaacattgaatccagagctcagcaacatcaggaaattcatccagatctagaattcatccccacatatattcccgagaaattggccaagataaattagcaaagtcttacaattctgtcagcgagtaaactctctccactaaggtttgcctttgtaatttgtccccaggaacatactggaatctgatctagtcataagcctgggggactgtgaggaatgttggtttccctttgtaagataacacccttaggcaaggagtctttaactaaggccagtcttgtctactagggtagcagggccaatttggcaaacatggaggacttcctggggtttgggagtctggattgttgcgtctgtcattctcgggcttagctccatttggattctcaattctcaccttttttggattaattttttcaattttatggaagaaccctgcaaaggttgaggattcaaccattagacttcagcaactaccagaacaaacctttccaggtgtgtgtattctcagtcactttagtcacgtccgactctttgcaaccctatggaccgtagcccgccagactcctttgtccatgggcttctccaagcaagaatactagagtgggttcccacgccctcctccaggggatcttcccgacccagagattgaacccacatctcctgtgtctcctgcactgcaggtggattctttacctgatgagccactagggaagctcctggtgtctcaggaggtaaagaatctggctgtaacgcaggagacccaggttgtaggttgggaagatcccctggagaagggaatggctacccactccagaactattgcctggagaattccatggacagtggagcctggtgggctacaattcttggggtcacaaagagtcgaacatgactgagcaactaacacttttcactttcaccagaacagaccggccctgcctcaataaaagatgagactctttcccagtcatagcaagttcctgaatttcagtccacgccttcaatcaaggctctagggacttttgttcattattttctttccttaagctatccagtgccattaaaagcaaacattccaccccacagtcctcagagtcctcctgccctttattcttctctgtggcacaggtcgtccaagcccctgatggcttgccttccatgggtacttcattttaggtgaccacaagggacactttaattagctgtttcagcactggggaccatgggcttctgggtctcctccctttgtgctagctgttatctcccagccttcagccctaactagggcaggagccaatcccagattcccaggattccctcggggtctgtgcctgcaccccaattacggcaccaagatttgtactaatcagggtacttgtttgcaaacaacagagagaaattctgtttgacatacactgaaaatacacaggcatcaggatgttcatcgaacctgtgcagaagccagaagaccaggcaggatccagagagacacagacgaggtcttgccacaggaatgatacctcaggagctgctccgggggtgtcgccaccaacctcctgtcccaccacaatgatcctcagtgaccctgcaccttaggccactctttctgttgagcagtcgagtgtgagtgtgtgtgtgtgtgtgtgtgtgtgtgtgtaggtgcatgcatgtaggtaggaagagaggaggaccagcgagtagctagctctcttatgggatttgtagggcaattagcactaaattagacgtgacctatgccaggctgaaatcccatctctaccatcaacttgacccagttgtgttatcttgagcaaatctctgaccatctctagacgggcctcagtttcatcatctgggaaatgggaacaatatccattcttccagcctcactgacgtgttgtgctcccacaccctccttttctcatggataggacttagttcaatgtataacgagacatttatttgtgaaggtaccactaatgttcctccagtagacggtaggctctgtgaggtcaaggacttcatctatctgcttagtgctgttaccccaacacctagaaaattgcatgaaatgtagcatgggcccaagaaatatttgaatgaaagactaaacaaggtaaaggatcaggaaggggatttgtaaatcgtcaagggccgcacatgtgtaagtgctggtgctttggagccagagagaccttgaaagtgaaagtgaaagtcactcaatcatgtttgactctttgtgaccccgtggactgtagttcatggaattctccaggccagaatactggagtgggtagcctttcctttctccaggagatcttcccaacccagggatagaacccaggtctcctgcattgcaggcggattctttaccagctgaaccacaagggaagcccaagaatactggagtgggtagcctatcccttctccagtggatcttcccaacccaggaatcaaaccggggtcttgtgcactgcaagtggattctttaccaactgagctatcagggaagccctgctgctgctgctaagtcactttagtcgtgtccgactctgtgtgaccccatagatggcagcccaccaggctccccggtccctgggattctccaggcaagaacactggagtggggtgccatttccttctccaatgcgtgaaagtgaaaagtgaaagggaagtcgctcagtcgtgtccgactcttctcgaccccatggactacagcccaccaggctcctccgtccatggaattttccaggtggagtggggtgtcattgccttctccaatgcatgaaagtgaaaagtgaaagggaagtcgctcagtcatatctgactcttcgcaaccccacggactgcagcctaccagactcctccgtccatgggattttccaggaagccctagagagaccttaattatcactattattgttgttgttataacccttgaattatatatattcagacacacagaattatttttagtgcaataaatgtaccattctctctctgtccctgcctgagatgctctttccctttctctccccctactcttgtgtcttcttttcctctacacttaggggaagtcacccagtgtccccatgagttcccgccatcacctgcacaccagcctcagcaggggccccctgcccaagactgtctgggagtcatctgccccaccccctccctccagctactccaggacttactccagaactgcagttacacctccttgtctggaacctcgggacctgacccaagacccagcctacaatggaggtttaggaaacaaatggataaatgaatgactctctgttttcaaaattataaaaccaatctctgtctttgcttgaggacagagtctgaagaaatgacctaaacccacagaaagatgcactaaaattagaccctaacagaaacttccccagtcgtgttatttactaagccctacaggggagagacagagacgagggaggctttccttcctcctggggaaaagcgaggggctagggagaggaagtgagacccttgggaaagtatacctccattggcagggagctcattacttgttgaaacaggctcctccattaccaacttccttcagcaaccagagtccactcagtcctcatgtttctgatccctacccttcacctctcccaccatcccctctctaaagagagtgtgactttgcagagctggcagccagcaagcctgccaccattcccaaaagaagacagaccttcctaacagtagtggagcaggctaactcagaaggtaatcaactcctcgatggtggaaatggacacagacctgccaagagatctgtctttgtaacacaacctcacttatgggagcactttaagcttaaccttctctcttggccatttgcgctgggttttgaagccatttttccaggtaaaagctgaaggaagggcattcaagacagaaggaatggcacgtatggaagcatagagatggaaaacggccccatgtttgcaaaaagacaaatcatcttgactttcaaggccggaatgtggggccccaatatttactgagcacagactctgcacagatgcaggggtaggacctggagagatactgcaaataagacaaacacacagtctccactctcatggaatttataatctagtgggggaacagaaaagaaacagacaaataagtgtgggcagtcttttcagatggttccacatgctgttaaaaaaaaaaacaggtgacacagtggagaacgactggtggttggggagcacctctctgagcaagtgacatgtgagctgagatctgaaagcagcaaagagatagtcacgcaaagagcaggctgaagaagttcctagctagaggccagcaagtgcaaaggccctgaggcagagacaaacttggaattacagagaaacacaggaggccagtgtggctgaagagtagggggagagtacctggtgctctgctggtctcccctgccccaatctctctcttctgcttggacactgggtctccaagcccagctgagtgttcagagcaagacactcactccctgctccccagtccccactgcttcaggatcctggttcattctggcagcaaatctctgcccatctcagtcagctctgcaaactcagcctgctgcatcctgcataagcagcccagcatctcagcccctcctcccccagccaagaccccagcacccactccaacctcaacccagaagccagggttcaagcctggtccaaaggggctccagtcaccaagctggatagccctttagacccaaaccaactgaggagccagctctggaggacagtgtgtggggcgggggggtgtcaggagcggcacattgttcggagatggcagagccagacacgagatcccagactagatagagctgggaacgaggaggggggctgggcttggcgttcctgggtggtgatgccatctccccggcaatggagggcggcaggcaggagcctcccattcccccagaggacttgtcctccctgctatctgatgagggagctgtcggttacaggaaggcaagactgttcacaggacagctccagggagcaggaaattaacccaccagccagagacagggggaggggggctgggcggggcaggtaattaaggggccctgcaattactgtgccttcaatctgggccagagttctcaggaaggggatggagatgctgctcagtcggaggccccagctgactctggcagggggcatcagccctgtctcacactcttccttccgtttccattcctgtctcccctgggccccatccctacctctgtccaaccacaagtgatccgctcattctcatctttgcacaactgttcctcccaccctaaaggcctttcccactcactcgatcctgcccttccatcggctcatgcaaaggactgttctccaagaagtcttcctggagcagtcatgtcggaagggattgctctgagctcacataacacagcccttttgtgttacgataagggaacagactcagagagggcaacgatcggtccagggtcacccagcagaatcaggactagaacctgagactcctgcatttgggactggattttttaccaccaccctgtgagctcactaaccgataaccagcccaggcgtcatcacatgccaaccacggacacagactgaggaccacagaagggtcaaggggcccgtcgcatttatccagcatctacttgctctggattgcggctggggattgggaatgctgtgaccagcagacacagacacagccctgcctttagggagtttaaggacccgccacaggatcacccagaggtatgttccaagataaactaagaagaaccttcaaaaaagaggccccaggctggtgaaaccttgtgacaaagacatttaacccaacctggggcccgagacaggcctctctggagatgctgggcctgggctgcaatctggagagtggaagacagcaactagatgaaatggagcagggaagaacgttccagacagggtgtctggcatgggcacagtccagcagaggaagtccagaatggctggagctctgagtgaagaggtagcctgagatccagcagggaggccatagggccccagcgatacaggactctggcttgggcatttgatctttatcctaaaagcactgcaaagccactgtagagttttcagcaagggaactgtgtacatagggaataccactggctgcagtatgaggaaagggttggaaggaaccagtgaaagcggggcctgccgagaggctcctccatagtccaggtgatggtggcggagaccagcactgtgccagcgggcagtcaaggaaggagtgttgagaagggatgtgttgaggatggaatctcccggggcagggctaggacaggggtgggggacaagctggggacggagtggagggagaggaaggagtcaaggtaaccccctccaggcttctggtttgtgcaatgagatgggggttaaccaccaagctgggggcagtgtgggaggaggggaaaaggctgagctgcagatgcttctgagagactggcgtccattggagctagagaccaggggtgagggggtaaggagacgccacctgggtcgtgtggtgagtgcaggcctgaagcagctactcggagccacaccttctctgtagctcctttagcacgacgggtgccgctgctcccactttccagaagaggaaactaaggctcagactggaaaactgcttacatagagttccacagtggcagaaccaagatctgccctccctgagtttttctcacttcaagctgcctcaggatgcctctctggctcgaacctggcccagaggagaaagcagagccacccacatacacagctgggactacagggagctttaagcatctgacaggcccttggtgggaagcttcccctgcagaggagaaaagggctaggaaggcagcctggagatgagcaagggccccacctccccatggtcagggccactaatctcacgctccttctgtgcattatacaaacttactctgctgggcccttcacacccaagaaggagtgctgttgctattcagtcgctcagcctgaactgataccccatggactgcagtatgccaggcttccctgcccctcactatctcccagagtttgctgaagttcatgtccattgcattggtgatgctatccaaccatctcatcctctgccaccctcttcttttgcctccaatctttcccagcatcaaggtcctttccaatgagttgggcttcacatcacgtggccaaagtattgctgctgctcccattttacagctggggaaagagaggcccagagagaggacagtcaaggtgagtttgtggcaaaatacagaaagccagggatgtctggtgccaggttcccagctcactctctccaaggactggaggggtttagtgagcagctaggggaggcagagagtgagaagccctgggcttaagggctacccagtccctcctatcccccatcaacccctcagtgggcctgggcctctggggtgcagacccgaggggatggggagaaggatggtattgagtctgccaggaagcttctgagagcctttgtggctacctgagcatccccactagcatctcttcactcttccacctgccctcacctccagagccaggcagcctcttgagcccaagcaggggaagggagaaggctgacagaggtctttccctgcccgcatcgtgcctgtctattcagttatcctcctgtcggggcctttgggggcagtcccgttggtgctggaccctctggtccctttgttcagaagagacctgaacaaaggggaccgagaccaagaagcagcagccagctcaggtggggagggaacaggaatcctgtggcccacaggagggtgactgctggcccagcctggagaaaccacacgctggagaaggccaaccctgtcctgtgaaccttgggatttgcaggtgtgatgggaagacccaactgcacagaagcagttgcttccctgcagaccccaagggatagcaaggagagggcagagcttagagggtcaaatatgtgtgtggggatgccgaggacaaggacgaagcagaaggggtcctggccagcagggggcgccagcgcaacagaaatccaagcaggtggtttgcaaggagcctgaaggccttgtctcaagtccggaggttaccagggctagagcatgatgctagagcacggaatgaagaggcacccactgatcagacctggctgttgaagcacgaccccagcacagggggcccggtatggtgtcataaataagagcccagccttcagaatctgcaaggacagatgagttggaatcctggttgctgctgtgcggccttaggcaagtcttttcctctctgatcttcagtccacctccataacaggaagatgctcattgcacttccagcctggggtcctggcgtgcagtaagtccccagtaaatggacaaagtgcttcataaaaaacaaagaatgcgttcagacgtcaggactggcaggaggatgcccacacccgccctccccccacccccagccactgacccagggtcctttaccttcccatacaggttggggtgggtacccacttccttcagagccagagggggttcagtgcaggaagaaggggcctcagggacagaatgccaggcaacgcaccagggatggagctgggaccttggccacttgacaggtttgcttcatttgctcaacaaagttatcaagcattcatcaagcacctgccccctggcaggctctgtaccaggcacagaagtatcaggtgagaaggcacacagacccaggcagtgacacctcctgctggccccaggcgggtggggccgggttctgcccctcctggcttgcgctagttggacacatcctggggccacttgagccacaaggccccgctactgcccaggtaagatgacctgtgactcagcagtcaaaggctcttgaaggctggaggtcagggagtgggctggcggcagaggtgggcatctcccactcttgtgctctcttccctgcaaaggccgctgcttgcagagactctggagctgacaaggcttggttcacatccaggctttctacataattcccagggcccctgagggagtcaatttctaccctctcagccccagatgccgctaggagaatacaggaaacactttaaatgatttactatatgatttctctttctctttcataaagaaagctcctctgctacaaactaaccctgtgaggttggtattggtacccagctatagcaaaggaaaggctcagagaagttaagtgacttgcacaagatcacacagtatatatcaggcccatcaaactccaaagcctatattccttctagagcacatactagctcagggcagattgattgttccttcttgataatgggctcatctgagaccaaaagaatcctcagttcgcagaaagctgtcagtgatgaagggcccttctggggtcctgacccccaccatcagaagcctaaggtcttggttgataaccctggcactgttgcagactggatgacctcaggccaggtcaaggtccaaagctcataccaagccccaggctcccgctcctgaaatgcaggggaggagttaagcattggacacagcattcctggcctttctctgcttctcacctccacctgctccatcacacagactgacccccaggcttccctctccagggaatccatgagactagcccacacaaacatggcaagaagctgctctgctgaaaggtgctgcaacttctcagaagcatagtgcctgcccggggctgaggctgcaggagctcagctgagatgccttcctgatgtatcttgagtttcccctgaggatttcctgcaggtcctcgaagcagaccttccagctgaggaagctctgcatctgggaacacaagagaccctgcgtctgtctgggcagagagacgcagtgggctgaagtcttccctagcctgttctgggcttatgtcttggtcgctggcactgctggattctcctggccacaaaggaggtgagaggctcagctgaaattgtaagggactcccagacctgagatgctccaattgtaattaaattccctgatcaagccatcagataaactggattgccttcacaagagcacagaatcagccagctataatgccagacccacagctcctcttccccagcctgcaggatgatccagcagggggaaggtactgtcattaaaaaggactttggggagagaacaaggaagaatcagatgtggaagagaactgctaggacgccccacagccaagcctgaggtcagacggcaagtgcccgggaaggaattcctggcaagcctgcgtcctcatgtttcaccaagacgtccaatgtgcctcagagaaggacaacatcagtggctaaacatctcttttccaggtgggatctggcagctggaaaacctgtgctgtagccagagtggtaccctgggttcttgtttgcatccggagcagttttagttgcataaaaaggaaggtgtgtgtgtatgtgtgcgtgcgtgtatgagggtgtatttccccctcagtataacattattgctggttaacaggataaattgggaaaatgcaactacaaagcgaaaccacacagccctgtctcccccaacactttcagccttctagtgacttctgtttgtcctcgggctttagaacactctctgctgtctccctcagcacagttaagattttaaagtgagcattttcctctcactctgagcccttcctctgcccaaaggctgctccctggttcacagtcttaaggtcgtttccatcttctgctattctggatacgcctaccacaggtgcctgcatgtgtgggaagcttttcccacgttctgaactatcccctttggatgaaggctctccatctgaagatcctctttgcaggttgattcttggagcctgtgagagctggagaccatgcctcccaacctgggagccctccacgttctttgtccccaaaatggccagagggcatacctgcgagaatttcccttctgctcaaggcccacagggatgcgggtgtcaccccagtggccctgaaaaggggactgaggctcctgaggagacaggttctcgtttgcttcatgtatgaaaaagcagcccatcagctggagatttctctttggggttcacggtcagacgcatgggggtcttgtctctgtcactggctagctgtgtgactttgggcaagttacttcccctctctgagcctgtattctcatctggagagtggagatgataatggcacctacttttctcgagtggctgtacacatgaagtgcaatgatgcaggtaaggccttcagcccagagttggctacagcactgtaagtggttaacacattggaaccattgttgttactcagccgctaagtcgtctctgactctttgtgaccccatgaactgttggttggaaccacagatggctactttagctgcatagccctttcagtccaaaaggtgtcctctgacttctccgggtgttcatttctccagggctaaatgggactgaggatgatttctgcctcccagagttgccagggagcaaatgagcccactgggataagaaggaactccttgtcaactgcagagcgcatggtggtcatttactttgcttgttgttggaatcttctggtgggaactcactacctatggatggggccccaggggcagatctggctaatacagcctcctccaggaagacaaagcctgtctctagctcttcacaagctggctccaacttccacagaaaccccccatcccaacccccgggatctgggttcacacagcgctgaggtccagccctggatgcatcactcccatctgtatgtccacgcccactggcccttctgtccctcaggcttctctctgtaaagtggtggctccccttctgccttcttgttagacagagcaggtgagctcacagtgcaccccgtgggtgctcattcttcatacatttccttttccccgaagatccacaggccagagggccccttctcccagctgcctgggtacatctagaatcaccttcctggtgctctgcccgccatgcctgatgtgaccagagtgggggccaggctggtctgtgaaggtcagaggtgtggatgggctcggggtccacagagagggggagagcaaatgagacccagacatgccagcttgtccaggccctcccccaggtgaaggtgtagcctgggatgagagagctcttaggggggcggcaggaggcgggatacacagccctgccctgtaccagagctctcacagtggagagctgtggagtgtgtgagtgtgtgtgtgtgtgtgtgtgtgtgtgtgtgtgtgagtgtatgtgcacccagttcagtcgctcagtcgtgagcgctctgactctttgtgatcccatggactgcagcacgccaggccgtcctgtccatcaccaattcccggagttcactcaaactcatgtccattgagtcggtgatgccatccaaccatcttattctctgtcgtccccttctcctcccgccttcaatctttcaagcatcagggttttttccagtgagtcacccacctgcaattataaaaccagatgcagtcaggaatgtttcaggagtgctggggggctgtggcagaggtgtgggcagttgcccctggggttagggtgtggaggcagaggtgggcttctggaggagggcatacctatctatgggagccggtgtcttccagggccctgagaagcccctcccgacactccccttggtggtggctgcacagctcccgcccagaagccagaaactgaccggaagggcttaaggcagtctagactccctcccaaggagcccgacctggcctgctcctacctcctgaccctacccccatcaccttaccagagcctgggggccctgggagtgtggtcagggagctctccccacacccaatggccagggaccacgggggagaccggaggcaagacccaagaaggcaggcatgggtgaaagtcaggaagcccaggacccaggctggtcttcgtgggcgcctcctgcagacctggcagcctctatgcctgaaacctcacagcaccttccaagggcggtgttgtcatgacccccatcttacagaggaagaaactgaggcccgcagaagtgacagaaccattctcccaagccagcgctgagccttgagccccatctgtgacagagtgtggcacacagagcccctcaccatgacgctgctgtgggccagcttgcgagtcagtgtgcccacccctccccccgaccctgtaaggcaggcggcttcagctcccactaaacaaacaggaacaagaccccccaggggcactgccctctcggagtggagctggctgtggcaagtgaggactcagggcttttattgccatttcagacacacaggaaggtcaaagcagacagaggggatggccgcagaggggcctggggtctccccactgggatgcctcagctttgaccccacccataaggacagccatgtgcccttctcaaccaggagggcaggtgtgggaggcctccaggacatgagatgggtcagcagacaccacctggcctgatgagcaggtccacccagggtgacctcggcctggcagtcacagcccagtgccaagaggaaggcctgggctcgctggcatttccagaactgccaggcaccagggtgggggcctagggttggtacccatcacagctctcagctaatggctgagatgtcaatccaccctccaaagtcggtccaaaataacttaattagcttgaaagagctgctggcagcctgccaggatggggtgggggaagggtagcaggacgagggccccccaacactgcagggaagaaccttgacaggaagacaagagcacccccattctgtggactgtaccctttcctcatcacagggactcgacccaccatggctctgccaggtccagccaactgagcccactggacagatgaggaaactgaggctcagagggggccaggatgcgctctgctgtattcatggcagatgggcactttgaaagtggggtgatgctacttgggggcaggaaaagttcagccctagaaaagctggtggggtctctagggagagagattaaggtgccagcaacgtaccatcaagccagagggatcccaggttgacatcggaagggacttgaggctgcaggaaaggacctgagcctaatctggaagaaaagagtgtgtggcatgaggcagtatccaccttgagagtcccagcgctgggggtccttgcccctctggcagagggttttagccagagccaagtctctgatagggtggcacctaggatcccctgctccctgcagcccccaggacactgggagcccaggcatggcggtgatcgggtgcgatcagggtgagacagacacacagccactgccctccagaccctgatgctgccctgtcagtgccaggctgggcactgccccaggatcacaggcaagggatggctgtgtgtgtggcagcccagagaggaacatgggacgcccagtgagctggagctctgccccaggtgtctgctccaaggctgagctcactactggtcccactggacacttgctcctcccacctcagagaatacactccgtcaaccacccaggttcccaagtcagacactggctgtctccctcctgctcaccccacccccagtcctgcccaagtcacctcccgaacttttgtaatctatctatcctgcaccctgtcccccatcccacccaatccagaccaccactgtccctctggatcgctgccaagtccttgtcacccatttctctggtctgcacactattctctctgtctctctctcacatgcatgtgccccatgaattatcaagggaatctttccaaaactcaagttcaaccaggtcagcctcattgccctccccaacctggccttggagactggggggattttcccactcacctcactgaggttggaacagagcaactgaaaccctgggctccagatcagccaggtctgggtctgcatcctgggtgggccgtttggtgactgtgtgatcttggatgagtcacaccaccttcctgagctctttcctcacctaggaagcaaggctgccacgaccttcatcaagaagaccccatggggcaccagggtggggccatgctgagcgcccggctcagagcagccacaccacgtggcaccaacgggcaccggccagctcccggctgcctctcaacacccgcctcacgtgctgcaggctgtgacctgacccggcagctggtcctccctctggctccaagagccccgtaacaccttgctctccacctatcggttctctggcctgtctctacctgtgagcaggagtagagcctgggacaggctcgatttacatttgatgaatgaatgaatgcagtacgagtgtctacagagggacacggccacgtagagaggcgcacaacacacacagccacctgcggctcagacgggctgagggccagagggggcccctaggttggtccattattacacacccctcggtgcagcccagctcagcttgagcctaagaagaaagctcaggacctgttttctgagggtccacgagggtgtgtgccctgcctccatcacgaggcatctgagcctaccacactcgggactacaaggagcagcccagggggccacagcacccccctgggcagggctgcctaaagtgggggtgcggggtggagtggtggctgccagctggcgagcgcctgggcctggcagtgccgccgatcgcccactcgcaccagctgttagtttccatggcctgcccaccagctagccaggatgctgggcccgggctgccctggggtgtcctgccaggaagaggcagcctctaggagggtggcctgggcagaggggagggcagaggaggggcaggggaggatgaggatgccaggctggaggaggccagggccaccctccgctcacagtgtggcccggaacaggctgccgcacttccagcgcctcaggcgcctcttctgggcagtccatgaggggccggaggtggggatggtgcccagggctcctccctccgctcaaaacacccagcaacagggattctggaccctcgggaggggaggtgctccgaggtctgcgaccacaagagggcgcccgagcctcaccttgcagggagccaaggcctgaggcccgcggtggagctgtgcctgggagagggcctgggagctgggactgaatccctgggcgtggcatgcagctacctgcgtccattctcaggcaagaccccatccacactttagctcttttttcaactgatggcaacactacctgcttcagtatacgtctgcagagtaagcgcaggaacacgctgctgctaagtcgcttcagtcgtgtccgattctgtgcaaccccatagacgacagcccaccaggctcccccgtccctgggattctccaggcaagaatactggagtgggttgccatttccttctccaatgaatgaaagtgaaaagtgaaagtgaagttgctcagtcgtgtctgactcctagcgaccccatggactgcagcctaccaggctcctccgtccatgggattttccaggcaagagtactggagtggggtgccatttccttctccaggaacacactaattgaatgataacggtgatgtagtattttaccgatgaagagaatggactcagagaggtttagtgatttgcctaagtcacacagcagtaggcatggagcaagttattccctctggtgctgggtgctggcagagctttggaaagagtcctggcaccaactcacagggggttagcagcactcaagtcctcagggtagggaccaagcctgattctggctcccccaggtcaccctgtgccataaagaccagacccttttctgggcaattacattaatgaaaagaggtcccagctgtgagccctttacacacccatgaggcatcctcgtcctctgactcacagatgaaggaggaaggcatgagagaagttaagaacttgccagaggccacaaagcttagttccagtactttggccccagaatccaccctcccctcaccatgctatgtcctggggaaactgtttttcccaaaggagcttctggccacctccgtccctctcctgttcacccaacagctttcccacctattcagttggggcagaggtgaacaccaggcccggccccatggaccgaccaccacccaaggggagacagacaaggtgcacatgactcattcagggccggagggcccctaaccaatcaggggtgtcagggtcttctgtggggaggcaaccactgagctgagttgcaaggaaaaaatgtagcacaatggcccttgctggcctcccattctgggcccagggggagctcgtgagttgggagaaactggccctgtgtgggtaggaggagtgggcaccccaagggcgagtccaggctggttcccagcaccctccagcacctggtcatcacaaagtcatggtgggctcatcaaggaatcaccactgggttgtgattggttatgggtgttcatggagccaagccctccaccagccttcccgcctttctctcaggatgggtaccccctagggcttcctcgattctatggggaccagagttggcggggtcaccaccctctgggtacaccgggcacagaccattgggccaccaacgcagcacctggagcccagagctcagagtctgagcagagcctggctggagggattgggggcaccagccagggtcccagcctgctgccttttgcatcaccagcctggagcccagcccagggccggcacctgtgcctcaaggcaccttgaggacctaactgcgcccctctgagaccctcttcccctaatggggcagtgaaagcacagccagccccagtgctccctgaccctcctggtctctcagggcctcctgtgtggttctagaagcaggactcaggctgtggcagccacctctctccaccagtggccaccgacactgaggtgcagagggagcctgggggctgtgaaggaggctgctccccctcatcgtgccagcagtggtgagaatcagacttccccgttcaaggacccccagctgatgttctttgtacccctgtgcccagccaccccctgcccctcagttctggggtccgtcagcaccaacagccctctcctcctctgcactctcccagccatccccaccccggacattgcctgcccccagaaccgccccctgatatttcccccctcccacccaggactggcttctctgtccaccatcctccaccctccctgttgggctggcttcactctcctgaccccgctctctgacctcatctcacccccctttcctcctcctggactccctccttatccagcctatatcccaagggacctttctgcacccagagtctcgagcacaccgaccctcaaaaatctcccaccccattctgcaaatgcccagcctggggcagacccacagtgctcctcctagaggatcccatctgtccccaggccccagggtccccctcccttgtctctccccacttcttccttccatcaagaaacacactcacctcttgataatgatctttcaagctgctctcttagccctgcacatggctccaactgggccccattccttctccccagcctggtggagctcttcaagcgttacttgtgtgcccatctctgcctcctcagccccctgccctctgcaccgcagtccaccaaaactcttctcatccgtcactcctgctacatcccgagagagttgggttcccatcccaggctggggccagagagctgtgccctgctctccccctcttccctgccccctgctcgtctccatggccccacgccctagtgaaggtcccctggctgctccttactcccccagtaggtccttctgccatcctgtcccacagacgacggagctctcttctagccccacatgatcatcccataccactgccccctcttacccggtaccaatgttcccaaactcgccaaggcctgtctccacgcccagggatccaactgcgtcttcagtgtgggtcaactccatccaagtaacttaatcgtgacacagtaacttcatgaaggaagtactattattatccccaatttgcagatgggggcaccaaggcacagagagagttgcccagggtaaacagctgatcagcctctgaaccaaggtctccttcctggagatccctcaagagcctcagattcaccataaacagaacaagctcacgggctctgcactgaatgtcttcttcctggccaagctggcctttggactggacagtgacaagcgtctggaccgtgggcaattttactttctgtgggaagtacttaacccagagctcaacagcagtaagtggccagtacaggccagctgctgttgtcaccatggccctccaaacctcagctgcttctagaagatggggctattgggggaatgtctgagctcagggcctggccacacgggggagactatagccctggccactccgcacaagagcctttttgcagtaagtcaaagcagcatcaatttataatgctgcaagtttggcacaaatgcactatttttcttaagccaaaataaagctccaataagctgtaaaagccctggagttgggaggattctctgcggggtcatttagggtgagttagaacctgcagctgtgaactcctcagccacacatggcaacctgggtgggtacaccccagaatgctaatgaaggcagctgctcagggtcggggagccagctttgctctggcttcaggccccagggagagggaaagccatgtggggtgagacaggacaggacctcagccaccctgggctgcgtgatctgggccaagcccgggccccactccaagctgcagcttcttccgatggggttccgaagcatgactcagaagagggaagttcagggcctggggtggggacttcgaatgatgtgtgcaggcattttcattccttgggcagagatctcaggatttgtaatagtgttgtaggaaaaatgggattaaacatgccaatatttgcttatgtacacaaccgtttccataaagcaggattgtgccccatctcaatggaagcaaccccaaagtccttcttgtttggggcaggtgagcatatgggaggctggatttgatcccaaactctgccctttgccaatcatggtctccccaagggacggttccccttgcccgttccacaggtgaggagactaaggcctgactctaaaatgcagcatcttaacttgtgtatatgcatgtgacccagctcccagtctctctgacctctggcttggtgaggtcacctctgcccgaggccctgcaccctcccccaattccctggtgcctggcaaagaacccagatcttgaaactccagagctcagctctgcacatacaagttcacgatcagaaacaagtaggtaccctctctctgggcctccgtttcctcctctgagccttggtaaaatgagggtgatgatggtagctaccccaaacagttaagctaattcatgcaaaacacccttgtggtgcctggcacaggataagtgctcaaccagcattcaatccgttcaggagataggatctatgacttctactctgaagataagtaaacagagaattggagaggtttggccacttgtccaaggtcacagagctcaggagctgtgatggcagggggagggtgtgaggggggcacgagctgaggctcaaaccaggtctccttgtccccatcagggtccagatggaaggggagtcaccgagccaaagcccccagggcagggacagggagagaagggaaggaggagagaaacaggaaggctaccaggacagagacgggaccgggagcaagctactgcctggggcagagggcccaagcccgcaggggtcacggggcacggttccccgggctgacagtgggcactctcaccttcaccctgttctctggtggctggtgaccttgacaactcaacctgcatcactcacatcctagtaaggccctgaaggcagacgttttgggggtggctcatctacatgacagcctcccacaccttgagccagagccagggtcctgccccctcccctggagttcaggagcaccctgcccacccaggggctcccattctgggctgcaggggcaggaggtgagccggagccctgagaaaccaacagcctacctacctgaggtgacctccaaccaacctcaagacctagggcacctagagggtggggggagcctccacctacagcagccagcctccatgtgcccacccgcaggcctcgcccatctctgctgacagctgggaattcctgccgtgtgacccagtcagcctttcagggctgggatcctggcccagccacccagacacggttatagctcaggctgtgagctgcctatgaggccagggcaagtgattcccatctctgggacttggcttctccaggtcagaggagggatgagctgcgagctgaaacaactcttcccacccagaggatctcgggatctggaatcccagaagccaagtgttggagagaacttcgggctgcgatttcctaacactggcctgcagcctgacaaagtcagggtccccggggagtcctgtgaacatgtacacgcgggggctcccttccacccccagcagatcagcagatgcggagccgggtgttctgcagatttagctagtgccctgggtccatgccttctgctgactctcaggggtgggggcaggggaaggaaggggagggtggggctgagggttcttcccgagacaaggtgcccagggatccctgagcctcccaaaatctttactgcttcatcccttgagtgtcctcagaccccctcccgcccgccacccagggctggaatccagcctttgctcccatcagcaactcctccacagaattctccaccagcttctccccatcctggtcctcttcacccaggagaggccacagctactggcccttccagcttcccctcccactcaaatcaggggcctgctttttgttttcttcctctcaagcctgcataaagaacactggatttagatgaacagctctgtgcacaggccctgtctgggccccatgtaactgccaccctgttgagctctaacacatttcctccaccccaaagagcccccagtcaagccccctgctcactgcacctccccggcccccctcagcagacctctagccccacagattagaagggagaagcctctttctaagcagctcttctgtgctcatcaggttggactgaaacccctgaggacagcaactgggctgtcctgctggctggcagtgcctggcacagagcagacattcgggaagggctgtgagaggaaggacaaggtggctgcaggctgcacccctgctccagctgctgccgtgatgagtctccttggctcatcatcccagcttccttcaatgtctaccacactctcagcccccagccccctgcaggacgcctggcacatggacacgcaggtgcaacacccccacctgccccggccaggcctctgtcaatgctcagacacctctttccccacagggctcctgccccatccccaagccttggctcccagaatcctggaatcacaggcacaccgaattcctggatctgcactctccccagtgcctccagcccctacccactctggcctcacttgtcctggcaggctgtcttctgtccctgtcccagcaccgtctcagcccccacagcaactcagagcctccgcactaagctattagcaggaagtcagctctccctcatgcccacaggctcccgcatgtgacctgcgacgagcaccctcccctctccaagcctcagctcctccgtctgtaagacagccccatcaggctatgtggattcagtggactcttctggctctgatgtttcctgcagatcactgcccacggttagtgtaaataaacatttattagataaataactagccccaaagaatgagtcatcattgatggtggaacggtagacatcagctgcaggccacttagaggcagaattcaagagtggtggtgaaagctggattcagactgcctgggttggaaaccctggttcacgacttcctcatctgtaagatggagatcacagtagggcagggtgaggatgaagtgcgatagtgtacagaagcagccagaagagcacctggcacttaaccagcgctcaggagaacttagctcccactggtacccccagcgccactgtccctcagcaaggctcgggagtccacatcagcgacctgcgggtggagccaagcgtagcagcagtgcctgactagtgccaccagagggcaccatgacgcagccaaagccgcccagctgaaccgagggctccctgattcatcctgagtggcagtgccagccagaagcctcccagctgggaggacgagggtggggcctggatgcccgaggagttctttctgcaggagatgcccgcaccaccttggcttgatattctgcccattcctagcacagtctgtgaccaacagcaacccaaagtgtccctaatccttccctccagagccatcagacccatttaacagatgaggaaacaggcctgagagaggccagctccaggtcatgaggtgaactctggccttcctgctcagactgacctcccagtacaccccactaaacactatgggtgtggcgcccacccccacaaccaaagctgggagccagcacctgtgcccacctgacactccttgggcagaggagagacaccagggaaaaaagcacatctaatggtggggagacctcaaggacggagggcccggggaaagtgctggatgtgagaggaagagacaaagaaacacgaggcgaaacagggtggggtgggcacggaagacaggagatgcaggagagacattcgagaaagtgaatgggtggaaagagacagacaggggaagaggcacagagacagagaatcccgagggagaaggcaaagagagaagcagaggcagaaggacggagacagaggcagagggagcgattgaggaaaagagagatggggatggggtcatggtgacagagagagacgggaggcagacccagggacaaagacctgtgggcaggggaccctggagggccaccgaagcggcttcactctggtctggagcccccatgccctcctcccaggcactcagccagagctctcgcccttgcatttctgtcacaccccctaccccagcagggcttgccagacagacaccccctcttgggggtggtggttgagccgggttccctagggcatctaaggcagacaggtagggtccctggggccgtgttgctaggagatccagcccagggccccagcctatctcctgagcctctcctagggcaaggctcaacactcacctaggggctcacctgagacctggattccccctagctttcaccccgtctggccctggacagcctctgccctgcatcctcttggcagagggaaggcacacctggtgacccagccggttgccaggcctccctggctcctgccccaggccccggggcctgctgtgttccttagaagcactagattcccgggcttgggtgcaggtggcagggagattgttcaaatctcagcctgccttttaccagctgtgtgcccctgggcaagtcactctccccctctgagtcttatctttaaacaaaaataataacagtatccattccatagggtcctctagaggaggaagagccataatgagggcacagcaactgggatgggagactggttttaagctccatctctgagccacctgggctgcagctgggagcatctccccgcagtccctgtctcccctttgcacctccttgagcaggctagagtctgattcacagcagcctcaggggaaggggctgcccagagccctcccagggaactcagataccaggagacatgaacactaggggcccaggcaaaaccacacccacatggttgttcgggcctgtgtgctgctttggggccttagatgaaagcaacttcagggcttcccaggtggcgctggtggtaaagaacctgcctgccaatgcaggagacataagagacatgagtttgatccctgggttgggaagatcccctggaggagggcatggcaacccactcaagtattcttgcctggagaataccatggacagagaagcctggcaggctacggtccatagggtcacaaagagtcggacatgactgaagcaccttagcaggcattcatgtaaaagcaacttagcttccaggcccagttggcctatgggcaggtctgaccacagtctccattttacatatgaagaaacagacgcaagagctgtgcctttgcccaagttttcaccaacaggtctgatgcagctgatgcnnnnnnnnnnnnnnnnnnnnnnnnnnnnnnnnnnnnnnnnnnnnnnnnnncctccaggctgcggctcacctcagtcataaatctgaggctgcagtgctggccaggcccctggcaggcggcagggggcagctccagggagcattggagcacgccagcaagaggagtcccttccccagccaactggaactcccacttggaggggatctaagaactgggcccccagctaaggcaggggcttcaccaggatactctgggattccaggacctacacactgggcattcagcccaaagtccctgacctggggcctgttctctgcctgtgccacttcattgcctcggatctcagcagtgtcagtccaaggcggtgtgtgggttggagggggttggagcatttatggcttcatgccttccaagtcagcccatggttttgtggaaatagatacttgaggtcgaggccagccctctcccaccctggccccctgaaccctgcaaacaccttgacctttcacttaaaaatgtaatgagatgaaagaggccagcaccatgccaggctgccagcatgagcccatccacagatgccagctcccttccattccctctctctccccactggcactgggcacagagtcaggctggtcaggagccttctggatacttttccagggacactgggcccttggccagaaatgccttccctgggcctcaggagatgggtcctaggagctgaaaagagaaccagaggggccattgggtgggatgggatgggggggccacctggagtagggggacacatgtgtcagccacgtgtctggatggcttcctaggtgaactttcaaccagcatcgcccaccctcccgctctctggcatgtgggtctcagggggctcctgatgcaccttccactgctttgcctcccttccccccagaccgggacaccctccaaagtgagctcaaagcctggctccagctctttctagctattcaacactgtgcaagtcacagggctgtgcatgaggctgatgtaagacaaaggggcatctgagatgcaggtatgatctggagaccggtgtggtcctaggtctcaggctgtctgtgagagaccataggagagtgtggggggccatgggcagaccagctgggggaagagggatgtgagtatgcaagtgtgtgtgcatgttctcacacttgtctctgtgcacacatgtgtgtggtgtgcttgtgtcatgtgctcatacatgtgtgcacatgcacacacgtgttgtgtgcatatgtatgcacacatacgtgtgtgggcacatagcatgtgtacatgtgcttgtgtccatgtcatatgagtacactatgggtgtgctctgtgcacacgtatgtgagtgcaagcatatacatgtagcgtgcaggaacgtgttgggggcactgcaggtgggtcttcctggcttccctgtgtccttacccactttgattccttgccttctccctccctctgtcttcctcagctcccaccgctccctgcttccttccttccaggaggcccagctgcctggtctccagacagtggcccgggtggcagtgagtgggagctgatcacactacgcactcacgaggaccctctaatcctcttagctcccactgaaccccccggccccccggtggagacagcccatgcccaaactcagctggcctggggtcaccacagcagaggctcatgggctcccaagctggccctcagcaggttaattagtaacaatgaaccccaaatcctcactggggcttcagagggatacttctccatcaataaggcccttttctggctgtgatcccttttggtcctaacagtctcttttgaggtggggatttgaattgcacatttgatggtgaagggcattgaggccttggagagggagggggcctttctggagatcacacagcaggtcagtggcagaattcactcaactcaggctgctcccacacctaaggcctcacggaaggctcctcccggagccccaaccccccaaaggggtccccgctctttgcctcctgcctccacccaccatcccaggtttcctggaatctgactcttgagagacctaccttgcctccgtccatcccttggggccaggggtgctgctcagaaccacctggtaacagtgcagcctgcatgccagttccctgtgctgccattccagagctccagtggctcgttggtcacacagcagtcagacctatgctaatctgctcttgcagtgggagcacagagagctggcatcaccccccaacaccccacgctcccccgccctccctgtccacatcagcacctctgctttctcttcactcacagcacccagaccactctggtttccttctgacttcccatcactcccacggttttcttcttgtaggttttgcaccctcagacccttgggcctgcaatgtctcctccagaagctcttagtctgcctgacccctcagtgctgggcctcagtgtccctgccccggagaaccttccccgactcccagtctagactaagcatccctgccatttgtctccaaggcacatttcccagtgtgcctgaatacatccccttacgtatttatttgcttcatataagtctcgccactagagcataagcttcttgcctgatgtcatgggaactcatatgtccctgtatgtccaacataggtcggagagatgctaggagcgtagtagagtgtaagtaactcctcagtgaataaatgaagggaggagagatgaacaggcaggatgttcctcctacacgcctgcatgaacgaagagctatggggtagagagagctgggagagctgctgggtctggcagaagcagccctggttaattgctcaccctccaggaggaggtggggaatgggggttcacacacacccccagccagctctcagagaggtcgtttggcctcaagtccccaccctctgcccccggctctgggctggatgcctggcctctgcctcctgagggctctcctcctttctctgggcacccccaggggacaaggcccgtttcctctgggcccatgtagactctgattctatcccaggctggggtccttacttgctgtgtggccccggcaagtccgtgcccatctccaactcagctttctcacttgcactgctgctgctgctcctgctaagtcgcttcagtcgtgtccgactctgtgcgaccccatagaccacagcccaccaggctcccccgtccctgggattctccaggcaagaacactggcgtaggttgccatttccttctccaatgcatgaaactgaaagtgaagtcgctcagttgtgtccgactcttagcgaccccatggactgcagcctaccaggctcctccatccatgggattttctaggcaaaagtactggattgggttgctattgccttctcctcacctgcactgcaggggagttgaaaaggatgatctctgtctgtctagcttccaaggaggcctccgactgttacctccggtattcacacccctgtgtaatcactgaagagactgaatcagtgtaacagatggagcggcgtgaacgtgagagtagggctcccgaagcacaggacagggaggctacgctgctcctctgatcacaggctctggggaccccagtcgccatgtggtaaggatactcaagcagcccagtggagaggaacggaggcttcccaccaacaaacagtaccaaccagccaggtgagggggttagtcaccttagaagcagatcctttatccccaggcaaatctgcagatgaccccagcccctgaccccagccccagccaagatcttggctacatgagagaccctgagccagaaccactcagctaagccaatcccaagactcctgatccctagaagctctgtgagataataaatgctgattgttcaaagccacaaagttttaaggttactggctacacaaaataaagtaatgaatatatttccaccttctgctgcctacccccagagttctggtctgaatcattggtctttcagaaaagccctaggttggtgtcaccaatgtcaaactcaactaagttcagggaggagctcatcatatccccccccatctacttccacaattagccattgccaacggacgtcctctagaatcaaagacagatacgtggtgtgcattattgttcagtcgctaagtcatgttcaactctgcagctccataaactgcagcgtgccacggttccctgtccttcaccatctcccagagcttgttcaaactcatgtgcattgagtcagtaatgccatccaaccatctcatcctctgtcacccccttctcctcctgccctcaatctttcccagcattaaggtattttctaatgaatcagctcttcgcttcaggtggccaaaggattggagcttcagcttcagcatcagtccttccaataaatattcagggttgattttctttaggattgactggtttgatctccttgcagtccaagggactctcaagagtcttctccagcaccacagttcgaaagcatcaattctttgctgttcagccctctctgtggtccaattatcacaaccatacatgactactggaaaaatcatagctttgactagacagacctttgtggtgtgcattattgccttccttatcccagcattcagccactgacaaacttggcctcttttatctcctgcccatctctagaatcctccctctctttaccaagcctaggtgccctgccccagctcaggccacaccctctcttgccagttcagcggctcctctctagtctccctgcctccatccttgctgctcttaccacccatccatcctccacactggccgctagagggagggacttcctaaaacatagatctgatcatgatgctcacctgctcattaatcttccatggctcccctgttgcctaaggcccgaactccttggcctggctttgaaggccttttttcatctgcccctaccccttacctctccatcctcatctctagtttttctttgtctcagtgttccattgatactgagccacctgcaattcttggaacacaagagtttcatacttccacacctttgctcacacagttctctccacctggattcccctccccttctttacctggaaaattcctactaatctgtcaagccctagccgtctgattctccgtgaggagctggtctctcactgcatcttattggactacaacaaactgtttacatgtctattcacccacaaagtgacaacctccaaagcaggatgtctttttcatctctatattcctagtaccttgctcagtcccagcatacagaattccataaagttcttaaaatggaagacctttagattgaactttaaggtcaactcatttaaaaatcattttggatgggaacacctctaaaaggtattacagactctcctacctttttaaactagtttatgggacatgattgaaccttgctcgagtgtatggtttatgtcagtacaaaccccgggtttttcagaaggagccttggaggtcatccaatagaggaaggacctcaggtctggaaagatcacgtgacttgcccaaggactttgcatgacgaacgttaatgaacatctgagctgcaagacggtgatctctttgctttgatgaaggatgtcaagcccttgccttgccacggcactaaatggcccctttagtcaatgtctttaaggtttctgtatgttttagaatcatcccatttcagcactaggccagtgtacctggcccccactttacccctctagtttgttacttctggtccactggaggcaggaggatcaggtaaccaaacttgatggaatcacacggaaaggaagagttacagccctggcctgagacctgggagcactgctcctcgggggagtgtggcgggacgatgggactttgtggccctcctgcctctgctgtgccccagatatgacagttgtcgtgaggagagactgaaggcttgggctggttctggcggagggaagtgtcagcataaccaagagatcctgcaggcaattcactcccaggtagatgactccacagggaggacaaagaggcggatcctggaccctgggctccataagctcccttcccacactccctcatcagagacaaagtgcatagtgcaagaggcaaaaggaagcagggcctctggggtggggtggggagagggggactggataggtgggaatagctctgtttatcttatccagcgagcaaacgaatgagggtggaacaggaagcaatgaactaagagatgaggattctagtccagcttccactactaactggatgcatgtcaaggggcaactcaactagtcaatctaggtgtccgtttcagaatctgtgaagtggggatgtgtgtgaaagttttagtcgtttagtcatgtccgactctatgccactccatggactgcagcctgccagactcctccgtctatggaattctccaggcaagaatactagaggcggtagccattcccttctccagggatcttcccgacccatggatcatacccacatctcccacattgcaggcagattctttaagatctgagccactagggaagccctgaaatggggataattcctacatcatggggttatagtgggattaacaaaaataatgtaaaaaagaacttagttctaaagtgctgctcaagggaacatggccttcattcacgcattgcacaaacacttactgattacctactatatgccagctgttccaggaactggggctgtggccatgaacatgacaaagcccaggtcccatggagctgactttctggggcgggagacacataaatgaataataatgtactaatcagtatctcaataaaggacagaaacggtatggacctagtagaagcagaagatattaagaagcggtggcaagaatacacagaagaactgtacaaaaaagatcttcatgacccagataatcacgatggtgtgatcactcacctagagccagacatcctggaatgtgaagtcaagtgggccttagaaagcatcatgacgaacaaagctagtggaggtgatggaattccagttgagttatttcaaatcctgaaagatgatgctgtgaaagtgctgcactcagtatgccagaaaatttggaaaactcagcagtggccacaggactggaaaaggtcagttttcattccaatcccaaagaaaggcannnnnnnnnnnnnnnnnnnnnnnnnnnnnnnnnnnnnnnnnnnnnnnnnnnnnnnnnnnnnnnnnnnnnnnnnnnnnnnnnnnnnnnnnnnnnnnnnnnnnnnnnnnnnnnnnnnnnnnnnnnnnnnnnnnnnnnnnnnnnnnnnnnnnnnnnnnnnnnnnnnnnnnnnnnnnnnnnnnnnnnnnnnnnnnnnnnnnnnnnnnnnnnnnnnnnnnnnnnnnnnnnnnnnnnnnnnnnnnnnnnnnnnnnnnnnnnnnnnnnnnnnnnnnnnnnnnnnnnnnnnnnnnnnnnnnnnnnnnnnnnnnnnnnnnnnnnnnnnnnnnnnnnnnnnnnnnnnnnnnnnnnnnnnnnnnnnnnnnnnnnnnnnnnnnnnnnnnnnnnnnnnnnnnnnnnnnnnnnnnnnnnnnnnnnnnnnnnnnnnnnnnnnnnnnnnnnnnnnnnnnnnnnnnnnnnnnnnnnnnnnnnnnnnnnnnnnnnnnnnnnnnnnnnnnnnnnnnnnnnnnnnnnnnnnnnnnnnnnnnnnnnnnnnnnnnnnnnnnnnnnnnnnnnnnnnnnnnnnnnnnnnnnnnnnnnnnnnnnnnnnnnnnnnnnnnnnnnnnnnnnnnnnnnnnnnnnnnnnnnnnnnnnnnnnnnnnnnnnnnnnnnnnnnnnnnnnnnnnnnnnnnnnnnnnnnnnnnnnnnnnnnnnnnnnnnnnnnnnnnnnnnnnnnnnnnnnnnnnnnnnnnnnnnnnnnnnnnnnnnnnnnnnnnnnnnnnnnnnnnnnnnnnnnnnnnnnnnnnnnnnnnnnnnnnnnnnnnnnnnnnnnnnnnnnnnnnnnnnnnnnnnnnnnnnnnnnnnnnnnnnnnnnnnnnnnnnnnnnnnnnnnnnnnnnnnnnnnnnnnnnnnnnnnnnnnnnnnnnnnnnnnnnnnnnnnnnnnnnnnnnnnnnnnnnnnnnnnnnnnnnnnnnnnnnnnnnnnnnnnnnnnnnnnnnnnnnnnnnnnnnnnnnnnnnnnnnnnnnnnnnnnnnnnnnnnnnnnnnnnnnnnnnnnnnnnnnnnnnnnnnnnnnnnnnnnnnnnnnnnnnnnnnnnnnnnnnnnnnnnnnnnnnnnnnnnnnnnnnnnnnnnnnnnnnnnnnnnnnnnnnnnnnnnnnnnnnnnnnnnnnnnnnnnnnnnnnnnnnnnnnnnnnnnnnnnnnnnnnnnnnnnnnnnnnnnnnnnnnnnnnnnnnnnnnnnnnnnnnnnnnnnnnnnnnnnnnnnnnnnnnnnnnnnnnnnnnnnnnnnnnnnnnnnnnnnnnnnnnnnnnnnnnnnnnnnnnnnnnnnnnnnnnnnnnnnnnnnnnnnnnnnnnnnnnnnnnnnnnnnnnnnnnnnnnnnnnnnnnnnnnnnnnnnnnnnnnnnnnnnnnnnnnnnnnnnnnnnnnnnnnnnnnnnnnnnnnnnnnnnnnnnnnnnnnnnnnnnnnnnnnnnnnnnnnnnnnnnnnnnnnnnnnnnnnnnnnnnnnnnnnnnnnnnnnnnnnnnnnnnnnnnnnnnnnnnnnnnnnnnnnnnnnnnnnnnnnnnnnnnnnnnnnnnnnnnnnnnnnnnnnnnnnnnnnnnnnnnnnnnnnnnnnnnnnnnnnnnnnnnnnnnnnnnnnnnnnnnnnnnnnnnnnnnnnnnnnnnnnnnnnnnnnnnnnnnnnnnnnnnnnnnnnnnnnnnnnnnnnnnnnnnnnnnnnnnnnnnnnnnnnnnnnnnnnnnnnnnnnnnnnnnnnnnnnnnnnnnnnnnnnnnnnnnnnnnnnnnnnnnnnnnnnnnnnnnnnnnnnnnnnnnnnnnnnnnnnnnnnnnnnnnnnnnnnnnnnnnnnnnnnnnnnnnnnnnnnnnnnnnnnnnnnnnnnnnnnnnnnnnnnnnnnnnnnnnnnnnnnnnnnnnnnnnnnnnnnnnnnnnnnnnnnnnnnnnnnnnnnnnnnnnnnnnnnnnnnnnnnnnnnnnnnnnnnnnnnnnnnnnnnnnnnnnnnnnnnnnnnnnnnnnnnnnnnnnnnnnnnnnnnnnnnnnnnnnnnnnnnnnnnnnnnnnnnnnnnnnnnnnnnnnnnnnnnnnnnnnnnnnnnnnnnnnnnnnnnnnnnnnnnnnnnnnnnnnnnnnnnnnnnnnnnnnnnnnnnnnnnnnnnnnnnnnnnnnnnnnnnnnnnnnnnnnnnnnnnnnnnnnnnnnnnnnnnnnnnnnnnnnnnnnnnnnnnnnnnnnnnnnnnnnnnnnnnnnnnnnnnnnnnnnnnnnnnnnnnnnnnnnnnnnnnnnnnnnnnnnnnnnnnnnnnnnnnnnnnnnnnnnnnnnnnnnnnnnnnnnnnnnnnnnnnnnnnnnnnnnnnnnnnnnnnnnnnnnnnnnnnnnnnnnnnnnnnnnnnnnnnnnnnnnnnnnnnnnnnnnnnnnnnnnnnnnnnnnnnnnnnnnnnnnnnnnnnnnnnnnnnnnnnnnnnnnnnnnnnnnnnnnnnnnnnnnnnnnnnnnnnnnnnnnnnnnnnnnnnnnnnnnnnnnnnnnnnnnnnnnnnnnnnnnnnnnnnnnnnnnnnnnnnnnnnnnnnnnnnnnnnnnnnnnnnnnnnnnnnnnnnnnnnnnnnnnnnnnnnnnnnnnnnnnnnnnnnnnnnnnnnnnnnnnnnnnnnnnnnnnnnnnnnnnnnnnnnnnnnnnnnnnnnnnnnnnnnnnnnnnnnnnnnnnnnnnnnnnnnnnnnnnnnnnnnnnnnnnnnnnnnnnnnnnnnnnnnnnnnnnnnnnnnnnnnnnnnnnnnnnnnnnnnnnnnnnnnnnnnnnnnnnnnnnnnnnnnnnnnnnnnnnnnnnnnnnnnnnnnnnnnnnnnnnnnnnnnnnnnnnnnnnnnnnnnnnnnnnnnnnnnnnnnnnnnnnnnnnnnnnnnnnnnnnnnnnnnnnnnnnnnnnnnnnnnnnnnnnnnnnnnnnnnnnnnnnnnnnnnnnnnnnnnnnnnnnnnnnnnnnnnnnnnnnnnnnnnnnnnnnnnnnnnnnnnnnnnnnnnnnnnnnnnnnnnnnnnnnnnnnnnnnnnnnnnnnnnnnnnnnnnnnnnnnnnnnnnnnnnnnnnnnnnnnnnnnnnnnnnnnnnnnnnnnnnnnnnnnnnnnnnnnnnnnnnnnnnnnnnnnnnnnnnnnnnnnnnnnnnnnnnnnnnnnnnnnnnnnnnnnnnnnnnnnnnnnnnnnnnnnnnnnnnnnnnnnnnnnnnnnnnnnnnnnnnnnnnnnnnnnnnnnnnnnnnnnnnnnnnnnnnnnnnnnnnnnnnnnnnnnnnnnnnnnnnnnnnnnnnnnnnnnnnnnnnnnnnnnnnnnnnnnnnnnnnnnnnnnnnnnnnnnnnnnnnnnnnnnnnnnnnnnnnnnnnnnnnnnnnnnnnnnnnnnnnnnnnnnnnnnnnnnnnnnnnnnnnnnnnnnnnnnnnnnnnnnnnnnnnnnnnnnnnnnnnnnnnnnnnnnnnnnnnnnnnnnnnnnnnnnnnnnnnnnnnnnnnnnnnnnnnnnnnnnnnnnnnnnnnnnnnnnnnnnnnnnnnnnnnnnnnnnnnnnnnnnnnnnnnnnnnnnnnnnnnnnnnnnnnnnnnnnnnnnnnnnnnnnnnnnnnnnnnnnnnnnnnnnnnnnnnnnnnnnnnnnnnnnnnnnnnnnnnnnnnnnnnnnnnnnnnnnnnnnnnnnnnnnnnnnnnnnnnnnnnnnnnnnnnnnnnnnnnnnnnnnnnnnnnnnnnnnnnnnnnnnnnnnnnnnnnnnnnnnnnnnnnnnnnnnnnnnnnnnnnnnnnnnnnnnnnnnnnnnnnnnnnnnnnnnnnnnnnnnnnnnnnnnnnnnnnnnnnnnnnnnnnnnnnnnnnnnnnnnnnnnnnnnnnnnnnnnnnnnnnnnnnnnnnnnnnnnnnnnnnnnnnnnnnnnnnnnnnnnnnnnnnnnnnnnnnnnnnnnnnnnnnnnnnnnnnnnnnnnnnnnnnnnnnnnnnnnnnnnnnnnnnnnnnnnnnnnnnnnnnnnnnnnnnnnnnnnnnnnnnnnnnnnnnnnnnnnnnnnnnnnnnnnnnnnnnnnnnnnnnnnnnnnnnnnnnnnnnnnnnnnnnnnnnnnnnnnnnnnnnnnnnnnnnnnnnnnnnnnnnnnnnnnnnnnnnnnnnnnnnnnnnnnnnnnnnnnnnnnnnnnnnnnnnnnnnnnnnnnnnnnnnnnnnnnnnnnnnnnnnnnnnnnnnnnnnnnnnnnnnnnnnnnnnnnnnnnnnnnnnnnnnnnnnnnnnnnnnnnnnnnnnnnnnnnnnnnnnnnnnnnnnnnnnnnnnnnnnnnnnnnnnnnnnnnnnnnnnnnnnnnnnnnnnnnnnnnnnnnnnnnnnnnnnnnnnnnnnnnnnnnnnnnnnnnnnnnnnnnnnnnnnnnnnnnnnnnnnnnnnnnnnnnnnnnnnnnnnnnnnnnnnnnnnnnnnnnnnnnnnnnnnnnnnnnnnnnnnnnnnnnnnnnnnnnnnnnnnnnnnnnnnnnnnnnnnnnnnnnnnnnnnnnnnnnnnnnnnnnnnnnnnnnnnnnnnnnnnnnnnnnnnnnnnnnnnnnnnnnnnnnnnnnnnnnnnnnnnnnnnnnnnnnnnnnnnnnnnnnnnnnnnnnnnnnnnnnnnnnnnnnnnnnnnnnnnnnnnnnnnnnnnnnnnnnnnnnnnnnnnnnnnnnnnnnnnnnnnnnnnnnnnnnnnnnnnnnnnnnnnnnnnnnnnnnnnnnnnnnnnnnnnnnnnnnnnnnnnnnnnnnnnnnnnnnnnnnnnnnnnnnnnnnnnnnnnnnnnnnnnnnnnnnnnnnnnnnnnnnnnnnnnnnnnnnnnnnnnnnnnnnnnnnnnnnnnnnnnnnnnnnnnnnnnnnnnnnnnnnnnnnnnnnnnnnnnnnnnnnnnnnnnnnnnnnnnnnnnnnnnnnnnnnnnnnnnnnnnnnnnnnnnnnnnnnnnnnnnnnnnnnnnnnnnnnnnnnnnnnnnnnnnnnnnnnnnnnnnnnnnnnnnnnnnnnnnnnnnnnnnnnnnnnnnnnnnnnnnnnnnnnnnnnnnnnnnnnnnnnnnnnnnnnnnnnnnnnnnnnnnnnnnnnnnnnnnnnnnnnnnnnnnnnnnnnnnnnnnnnnnnnnnnnnnnnnnnnnnnnnnnnnnnnnnnnnnnnnnnnnnnnnnnnnnnnnnnnnnnnnnnnnnnnnnnnnnnnnnnnnnnnnnnnnnnnnnnnnnnnnnnnnnnnnnnnnnnnnnnnnnnnnnnnnnnnnnnnnnnnnnnnnnnnnnnnnnnnnnnnnnnnnnnnnnnnnnnnnnnnnnnnnnnnnnnnnnnnnnnnnnnnnnnnnnnnnnnnnnnnnnnnnnnnnnnnnnnnnnnnnnnnnnnnnnnnnnnnnnnnnnnnnnnnnnnnnnnnnnnnnnnnnnnnnnnnnnnnnnnnnnnnnnnnnnnnnnnnnnnnnnnnnnnnnnnnnnnnnnnnnnnnnnnnnnnnnnnnnnnnnnnnnnnnnnnnnnnnnnnnnnnnnnnnnnnnnnnnnnnnnnnnnnnnnnnnnnnnnnnnnnnnnnnnnnnnnnnnnnnnnnnnnnnnnnnnnnnnnnnnnnnnnnnnnnnnnnnnnnnnnnnnnnnnnnnnnnnnnnnnnnnnnnnnnnnnnnnnnnnnnnnnnnnnnnnnnnnnnnnnnnnnnnnnnnnnnnnnnnnnnnnnnnnnnnnnnnnnnnnnnnnnnnnnnnnnnnnnnnnnnnnnnnnnnnnnnnnnnnnnnnnnnnnnnnnnnnnnnnnnnnnnnnnnnnnnnnnnnnnnnnnnnnnnnnnnnnnnnnnnnnnnnnnnnnnnnnnnnnnnnnnnnnngcaagaatactagagtgggttcccacgccctcctccaggggatcttcccgacccagagattgaacccacatctcctgtgtctcctgcactgcaggtggattctttacctgatgagccactagggaagctcctggtgtctcaggaggtaaagaatctggctgtaacgcaggagacccaggttgtaggttgggaagatcccctggagaagggaatggctacccactccagaactattgcctggagaattccatggacagtggagcctggtgggctacaattcttggggtcacaaagagtcgaacatgactgagcaactaacacttttcactttcaccagaacagaccggccctgcctcaataaaagatgagactctttcccagtcatagcaagttcctgaatttcagtccacgccttcaatcaaggctctagggacttttgttcattattttctttccttaagctatccagtgccattaaaagcaaacattccaccccacagtcctcagagtcctcctgccctttattcttctctgtggcacaggtcgtccaagcccctgatggcttgccttccatgggtacttcattttaggtgaccacaagggacactttaattagctgtttcagcactggggaccatgggcttctgggtctcctccctttgtgctagctgttatctcccagccttcagccctaactagggcaggagccaatcccagattcccaggattccctcggggtctgtgcctgcaccccaattacggcaccaagatttgtactaatcagggtacttgtttgcaaacaacagagagaaattctgtttgacatacactgaaaatacacaggcatcaggatgttcatcgaacctgtgcagaagccagaagaccaggcaggatccagagagacacagacgaggtcttgccacaggaatgatacctcaggagctgctccgggggtgtcgccaccaacctcctgtcccaccacaatgatcctcagtgaccctgcaccttaggccactctttctgttgagcagtcgagtgtgagtgtgtgtgtgtgtgtgtgtgtgtgtgtgtaggtgcatgcatgtaggtaggaagagaggaggaccagcgagtagctagctctcttatgggatttgtagggcaattagcactaaattagacgtgacctatgccaggctgaaatcccatctctaccatcaacttgacccagttgtgttatcttgagcaaatctctgaccatctctagacgggcctcagtttcatcatctgggaaatgggaacaatatccattcttccagcctcactgacgtgttgtgctcccacaccctccttttctcatggataggacttagttcaatgtataacgagacatttatttgtgaaggtaccactaatgttcctccagtagacggtaggctctgtgaggtcaaggacttcatctatctgcttagtgctgttaccccaacacctagaaaattgcatgaaatgtagcatgggcccaagaaatatttgaatgaaagactaaacaaggtaaaggatcaggaaggggatttgtaaatcgtcaagggccgcacatgtgtaagtgctggtgctttggagccagagagaccttgaaagtgaaagtgaaagtcactcaatcatgtttgactctttgtgaccccgtggactgtagttcatggaattctccaggccagaatactggagtgggtagcctttcctttctccaggagatcttcccaacccagggatagaacccaggtctcctgcattgcaggcggattctttaccagctgaaccacaagggaagcccaagaatactggagtgggtagcctatcccttctccagtggatcttcccaacccaggaatcaaaccggggtcttgtgcactgcaagtggattctttaccaactgagctatcagggaagccctgctgctgctgctaagtcactttagtcgtgtccgactctgtgtgaccccatagatggcagcccaccaggctccccggtccctgggattctccaggcaagaacactggagtggggtgccatttccttctccaatgcgtgaaagtgaaaagtgaaagggaagtcgctcagtcgtgtccgactcttctcgaccccatggactacagcccaccaggctcctccgtccatnnnnnnnnnnnnnnnnnnnnnnnnnnnnnnnnnnnnnnnnnnnnnnnnnnnnnnnnnnnnnnnnnnnnnnnnnnnnnnnnnnnnnnnnnnnnnnnnnnnnnnnnnnnnnnnnnnnnnnnnnnnnnnnnnnnnnnnnnnnnnnnnnnnnnnnnnnnnnnnnnnnnnnnnnnnnnnnnnnnnnnnnnnnnnnnnnnnttgtgtcttcttttcctctacacttaggggaagtcacccagtgtccccatgagttcccgccatcacctgcacaccagcctcagcaggggccccctgcccaagactgtctgggagtcatctgccccaccccctccctccagctactccaggacttactccagaactgcagttacacctccttgtctggaacctcgggacctgacccaagacccagcctacaatggaggtttaggaaacaaatggataaatgaatgactctctgttttcaaaattataaaaccaatctctgtctttgcttgaggacagagtctgaagaaatgacctaaacccacagaaagatgcactaaaattagaccctaacagaaacttccccagtcgtgttatttactaagccctacaggggagagacagagacgagggaggctttccttcctcctggggaaaagcgaggggctagggagaggaagtgagacccttgggaaagtatacctccattggcagggagctcattacttgttgaaacaggctcctccattaccaacttccttcagcaaccagagtccactcagtcctcatgtttctgatccctacccttcacctctcccaccatcccctctctaaagagagtgtgactttgcagagctggcagccagcaagcctgccaccattcccaaaagaagacagaccttcctaacagtagtggagcaggctaactcagaaggtaatcaactcctcgatggtggaaatggacacagacctgccaagagatctgtctttgtaacacaacctcacttatgggagcactttaagcttaaccttctctcttggccatttgcgctgggttttgaagccatttttccaggtaaaagctgaaggaagggcattcaagacagaaggaatggcacgtatggaagcatagagatggaaaacggccccatgtttgcaaaaagacaaatcatcttgactttcaaggccggaatgtggggccccaatatttactgagcacagactctgcacagatgcaggggtaggacctggagagatactgcaaataagacaaacacacagtctccactctcatggaatttataatctagtgggggaacagaaaagaaacagacaaataagtgtgggcagtcttttcagatggttccacatgctgttaaaaaaaaaaacaggtgacacagtggagaacgactggtggttggggagcacctctctgagcaagtgacatgtgagctgagatctgaaagcagcaaagagatagtcacgcaaagagcaggctgaagaagttcctagctagaggccagcaagtgcaaaggccctgaggcagagacaaacttggaattacagagaaacacaggaggccagtgtggctgaagagtagggggagagtacctggtgctctgctggtctcccctgccccaatctctctcttctgcttggacactgggtctccaagcccagctgagtgttcagagcaagacactcactccctgctccccagtccccactgcttcaggatcctggttcattctggcagcaaatctctgcccatctcagtcagctctgcaaactcagcctgctgcatcctgcataagcagcccagcatctcagcccctcctcccccagccaagaccccagcacccactccaacctcaacccagaagccagggttcaagcctggtccaaaggggctccagtcaccaagctggatagccctttagacccaaaccaactgaggagccagctctggaggacagtgtgtggggcgggggggtgtcaggagcggcacattgttcggagatggcagagccagacacgagatcccagactagatagagctgggaacgaggaggggggctgggcttggcgttcctgggtggtgatgccatctccccggcaatggagggcggcaggcaggagcctcccattcccccagaggacttgtcctccctgctatctgatgagggagctgtcggttacaggaaggcaagactgttcacaggacagctccagggagcaggaaattaacccaccagccagagacagggggaggggggctgggcggggcaggtaattaaggggccctgcaattactgtgccttcaatctgggccagagttctcaggaaggggatggagatgctgctcagtcggaggccccagctgactctggcagggggcatcagccctgtctcacactcttccttccgtttccattcctgtctcccctgggccccatccctacctctgtccaaccacaagtgatccgctcattctcatctttgcacaactgttcctcccaccctaaaggcctttcccactcactcgatcctgcccttccatcggctcatgcaaaggactgttctccaagaagtcttcctggagcagtcatgtcggaagggattgctctgagctcacataacacagcccttttgtgttacgataagggaacagactcagagagggcaacgatcggtccagggtcacccagcagaatcaggactagaacctgagactcctgcatttgggactggattttttaccaccaccctgtgagctcactaaccgataaccagcccaggcgtcatcacatgccaaccacggacacagactgaggaccacagaagggtcaaggggcccgtcgcatttatccagcatctacttgctctggattgcggctggggattgggaatgctgtgaccagcagacacagacacagccctgcctttagggagtttaaggacccgccacaggatcacccagaggtatgttccaagataaactaagaagaaccttcaaaaaagaggccccaggctggtgaaaccttgtgacaaagacatttaacccaacctggggcccgagacaggcctctctggagatgctgggcctgggctgcaatctggagagtggaagacagcaactagatgaaatggagcagggaagaacgttccagacagggtgtctggcatgggcacagtccagcagaggaagtccagaatggctggagctctgagtgaagaggtagcctgagatccagcagggaggccatagggccccagcgatacaggactctggcttgggcatttgatctttatcctaaaagcactgcaaagccactgtagagttttcagcaagggaactgtgtacatagggaataccactggctgcagtatgaggaaagggttggaaggaaccagtgaaagcggggcctgccgagaggctcctccatagtccaggtgatggtggcggagaccagcactgtgccagcgggcagtcaaggaaggagtgttgagaagggatgtgttgaggatggaatctcccggggcagggctaggacaggggtgggggacaagctggggacggagtggagggagaggaaggagtcaaggtaaccccctccaggcttctggtttgtgcaatgagatgggggttaaccaccaagctgggggcagtgtgggaggaggggaaaaggctgagctgcagatgcttctgagagactggcgtccattggagctagagaccaggggtgagggggtaaggagacgccacctgggtcgtgtggtgagtgcaggcctgaagcagctactcggagccacaccttctctgtagctcctttagcacgacgggtgccgctgctcccactttccagaagaggaaactaaggctcagactggaaaactgcttacatagagttccacagtggcagaaccaagatctgccctccctgagtttttctcacttcaagctgcctcaggatgcctctctggctcgaacctggcccagaggagaaagcagagccacccacatacacagctgggactacagggagctttaagcatctgacaggcccttggtgggaagcttcccctgcagaggagaaaagggctaggaaggcagcctggagatgagcaagggccccacctccccatggtcagggccactaatctcacgctccttctgtgcattatacaaacttactctgctgggcccttcacacccaagaaggagtgctgttgctattcagtcgctcagcctgaactgataccccatggactgcagtatgccaggcttccctgcccctcactatctcccagagtttgctgaagttcatgtccattgcattggtgatgctatccaaccatctcatcctctgccaccctcttcttttgcctccaatctttcccagcatcaaggtcctttccaatgagttgggcttcacatcacgtggccaaagtattgctgctgctcccattttacagctggggaaagagaggcccagagagaggacagtcaaggtgagtttgtggcaaaatacagaaagccagggatgtctggtgccaggttcccagctcactctctccaaggactggaggggtttagtgagcagctaggggaggcagagagtgagaagccctgggcttaagggctacccagtccctcctatcccccatcaacccctcagtgggcctgggcctctggggtgcagacccgaggggatggggagaaggatggtattgagtctgccaggaagcttctgagagcctttgtggctacctgagcatccccactagcatctcttcactcttccacctgccctcacctccagagccaggcagcctcttgagcccaagcaggggaagggagaaggctgacagaggtctttccctgcccgcatcgtgcctgtctattcagttatcctcctgtcggggcctttgggggcagtcccgttggtgctggaccctctggtccctttgttcagaagagacctgaacaaaggggaccgagaccaagaagcagcagccagctcaggtggggagggaacaggaatcctgtggcccacaggagggtgactgctggcccagcctggagaaaccacacgctggagaaggccaaccctgtcctgtgaaccttgggatttgcaggtgtgatgggaagacccaactgcacagaagcagttgcttccctgcagaccccaagggatagcaaggagagggcagagcttagagggtcaaatatgtgtgtggggatgccgaggacaaggacgaagcagaaggggtcctggccagcagggggcgccagcgcaacagaaatccaagcaggtggtttgcaaggagcctgaaggccttgtctcaagtccggaggttaccagggctagagcatgatgctagagcacggaatgaagaggcacccactgatcagacctggctgttgaagcacgaccccagcacagggggcccggtatggtgtcataaataagagcccagccttcagaatctgcaaggacagatgagttggaatcctggttgctgctgtgcggccttaggcaagtcttttcctctctgatcttcagtccacctccataacaggaagatgctcattgcacttccagcctggggtcctggcgtgcagtaagtccccagtaaatggacaaagtgcttcataaaaaacaaagaatgcgttcagacgtcaggactggcaggaggatgcccacacccgccctccccccacccccagccactgacccagggtcctttaccttcccatacaggttggggtgggtacccacttccttcagagccagagggggttcagtgcaggaagaaggggcctcagggacagaatgccaggcaacgcaccagggatggagctgggaccttggccacttgacaggtttgcttcatttgctcaacaaagttatcaagcattcatcaagcacctgccccctggcaggctctgtaccaggcacagaagtatcaggtgagaaggcacacagacccaggcagtgacacctcctgctggccccaggcgggtggggccgggttctgcccctcctggcttgcgctagttggacacatcctggggccacttgagccacaaggccccgctactgcccaggtaagatgacctgtgactcagcagtcaaaggctcttgaaggctggaggtcagggagtgggctggcggcagaggtgggcatctcccactcttgtgctctcttccctgcaaaggccgctgcttgcagagactctggagctgacaaggcttggttcacatccaggctttctacataattcccagggcccctgagggagtcaatttctaccctctcagccccagatgccgctaggagaatacaggaaacactttaaatgatttactatatgatttctctttctctttcataaagaaagctcctctgctacaaactaaccctgtgaggttggtattggtacccagctatagcaaaggaaaggctcagagaagttaagtgacttgcacaagatcacacagtatatatcaggcccatcaaactccaaagcctatattccttctagagcacatactagctcagggcagattgattgttccttcttgataatgggctcatctgagaccaaaagaatcctcagttcgcagaaagctgtcagtgatgaagggcccttctggggtcctgacccccaccatcagaagcctaaggtcttggttgataaccctggcactgttgcagactggatgacctcaggccaggtcaaggtccaaagctcataccaagccccaggctcccgctcctgaaatgcaggggaggagttaagcattggacacagcattcctggcctttctctgcttctcacctccacctgctccatcacacagactgacccccaggcttccctctccagggaatccatgagactagcccacacaaacatggcaagaagctgctctgctgaaaggtgctgcaacttctcagaagcatagtgcctgcccggggctgaggctgcaggagctcagctgagatgccttcctgatgtatcttgagtttcccctgaggatttcctgcaggtcctcgaagcagaccttccagctgaggaagctctgcatctgggaacacaagagaccctgcgtctgtctgggcagagagacgcagtgggctgaagtcttccctagcctgttctgggcttatgtcttggtcgctggcactgctggattctcctggccacaaaggaggtgagaggctcagctgaaattgtaagggactcccagacctgagatgctccaattgtaattaaattccctgatcaagccatcagataaactggattgccttcacaagagcacagaatcagccagctataatgccagacccacagctcctcttccccagcctgcaggatgatccagcagggggaaggtactgtcattaaaaaggactttggggagagaacaaggaagaatcagatgtggaagagaactgctaggacgccccacagccaagcctgaggtcagacggcaagtgcccgggaaggaattcctggcaagcctgcgtcctcatgtttcaccaagacgtccaatgtgcctcagagaaggacaacatcagtggctaaacatctcttttccaggtgggatctggcagctggaaaacctgtgctgtagccagagtggtaccctgggttcttgtttgcatccggagcagttttagttgcataaaaaggaaggtgtgtgtgtatgtgtgcgtgcgtgtatgagggtgtatttccccctcagtataacattattgctggttaacaggataaattgggaaaatgcaactacaaagcgaaaccacacagccctgtctcccccaacactttcagccttctagtgacttctgtttgtcctcgggctttagaacactctctgctgtctccctcagcacagttaagattttaaagtgagcattttcctctcactctgagcccttcctctgcccaaaggctgctccctggttcacagtcttaaggtcgtttccatcttctgctattctggatacgcctaccacaggtgcctgcatgtgtgggaagcttttcccacgttctgaactatcccctttggatgaaggctctccatctgaagatcctctttgcaggttgattcttggagcctgtgagagctggagaccatgcctcccaacctgggagccctccacgttctttgtccccaaaatggccagagggcatacctgcgagaatttcccttctgctcaaggcccacagggatgcgggtgtcaccccagtggccctgaaaaggggactgaggctcctgaggagacaggttctcgtttgcttcatgtatgaaaaagcagcccatcagctggagatttctctttggggttcacggtcagacgcatgggggtcttgtctctgtcactggctagctgtgtgactttgggcaagttacttcccctctctgagcctgtattctcatctggagagtggagatgataatggcacctacttttctcgagtggctgtacacatgaagtgcaatgatgcaggtaaggccttcagcccagagttggctacagcactgtaagtggttaacacattggaaccattgttgttactcagccgctaagtcgtctctgactctttgtgaccccatgaactgttggttggaaccacagatggctactttagctgcatagccctttcagtccaaaaggtgtcctctgacttctccgggtgttcatttctccagggctaaatgggactgaggatgatttctgcctcccagagttgccagggagcaaatgagcccactgggataagaaggaactccttgtcaactgcagagcgcatggtggtcatttactttgcttgttgttggaatcttctggtgggaactcactacctatggatggggccccaggggcagatctggctaatacagcctcctccaggaagacaaagcctgtctctagctcttcacaagctggctccaacttccacagaaaccccccatcccaacccccgggatctgggttcacacagcgctgaggtccagccctggatgcatcactcccatctgtatgtccacgcccactggcccttctgtccctcaggcttctctctgtaaagtggtggctccccttctgccttcttgttagacagagcaggtgagctcacagtgcaccccgtgggtgctcattcttcatacatttccttttccccgaagatccacaggccagagggccccttctcccagctgcctgggtacatctagaatcaccttcctggtgctctgcccgccatgcctgatgtgaccagagtgggggccaggctggtctgtgaaggtcagaggtgtggatgggctcggggtccacagagagggggagagcaaatgagacccagacatgccagcttgtccaggccctcccccaggtgaaggtgtagcctgggatgagagagctcttaggggggcggcaggaggcgggatacacagccctgccctgtaccagagctctcacagtggagagctgtggagtgtgtgagtgtgtgtgtgtgtgtgtgtgtgtgtgtgtgtgagtgtatgtgcacccagttcagtcgctcagtcgtgagcgctctgactctttgtgatcccatggactgcagcacgccaggccgtcctgtccatcaccaattcccggagttcactcaaactcatgtccattgagtcggtgatgccatccaaccatcttattctctgtcgtccccttctcctcccgccttcaatctttcaagcatcagggttttttccagtgagtcacccacctgcaattataaaaccagatgcagtcaggaatgtttcaggagtgctggggggctgtggcagaggtgtgggcagttgcccctggggttagggtgtggaggcagaggtgggcttctggaggagggcatacctatctatgggagccggtgtcttccagggccctgagaagcccctcccgacactccccttggtggtggctgcacagctcccgcccagaagccagaaactgaccggaagggcttaaggcagtctagactccctcccaaggagcccgacctggcctgctcctacctcctgaccctacccccatcaccttaccagagcctgggggccctgggagtgtggtcagggagctctccccacacccaatggccagggaccacgggggagaccggaggcaagacccaagaaggcaggcatgggtgaaagtcaggaagcccaggacccaggctggtcttcgtgggcgcctcctgcagacctggcagcctctatgcctgaaacctcacagcaccttccaagggcggtgttgtcatgacccccatcttacagaggaagaaactgaggcccgcagaagtgacagaaccattctcccaagccagcgctgagccttgagccccatctgtgacagagtgtggcacacagagcccctcaccatgacgctgctgtgggccagcttgcgagtcagtgtgcccacccctccccccgaccctgtaaggcaggcggcttcagctcccactaaacaaacaggaacaagaccccccaggggcactgccctctcggagtggagctggctgtggcaagtgaggactcagggcttttattgccatttcagacacacaggaaggtcaaagcagacagaggggatggccgcagaggggcctggggtctccccactgggatgcctcagctttgaccccacccataaggacagccatgtgcccttctcaaccaggagggcaggtgtgggaggcctccaggacatgagatgggtcagcagacaccacctggcctgatgagcaggtccacccagggtgacctcggcctggcagtcacagcccagtgccaagaggaaggcctgggctcgctggcatttccagaactgccaggcaccagggtgggggcctagggttggtacccatcacagctctcagctaatggctgagatgtcaatccaccctccaaagtcggtccaaaataacttaattagcttgaaagagctgctggcagcctgccaggatggggtgggggaagggtagcaggacgagggccccccaacactgcagggaagaaccttgacaggaagacaagagcacccccattctgtggactgtaccctttcctcatcacagggactcgacccaccatggctctgccaggtccagccaactgagcccactggacagatgaggaaactgaggctcagagggggccaggatgcgctctgctgtattcatggcagatgggcactttgaaagtggggtgatgctacttgggggcaggaaaagttcagccctagaaaagctggtggggtctctagggagagagattaaggtgccagcaacgtaccatcaagccagagggatcccaggttgacatcggaagggacttgaggctgcaggaaaggacctgagcctaatctggaagaaaagagtgtgtggcatgaggcagtatccaccttgagagtcccagcgctgggggtccttgcccctctggcagagggttttagccagagccaagtctctgatagggtggcacctaggatcccctgctccctgcagcccccaggacactgggagcccaggcatggcggtgatcgggtgcgatcagggtgagacagacacacagccactgccctccagaccctgatgctgccctgtcagtgccaggctgggcactgccccaggatcacaggcaagggatggctgtgtgtgtggcagcccagagaggaacatgggacgcccagtgagctggagctctgccccaggtgtctgctccaaggctgagctcactactggtcccactggacacttgctcctcccacctcagagaatacactccgtcaaccacccaggttcccaagtcagacactggctgtctccctcctgctcaccccacccccagtcctgcccaagtcacctcccgaacttttgtaatctatctatcctgcaccctgtcccccatcccacccaatccagaccaccactgtccctctggatcgctgccaagtccttgtcacccatttctctggtctgcacactattctctctgtctctctctcacatgcatgtgccccatgaattatcaagggaatctttccaaaactcaagttcaaccaggtcagcctcattgccctccccaacctggccttggagactggggggattttcccactcacctcactgaggttggaacagagcaactgaaaccctgggctccagatcagccaggtctgggtctgcatcctgggtgggccgtttggtgactgtgtgatcttggatgagtcacaccaccttcctgagctctttcctcacctaggaagcaaggctgccacgaccttcatcaagaagaccccatggggcaccagggtggggccatgctgagcgcccggctcagagcagccacaccacgtggcaccaacgggcaccggccagctcccggctgcctctcaacacccgcctcacgtgctgcaggctgtgacctgacccggcagctggtcctccctctggctccaagagccccgtaacaccttgctctccacctatcggttctctggcctgtctctacctgtgagcaggagtagagcctgggacaggctcgatttacatttgatgaatgaatgaatgcagtacgagtgtctacagagggacacggccacgtagagaggcgcacaacacacacagccacctgcggctcagacgggctgagggccagagggggcccctaggttggtccattattacacacccctcggtgcagcccagctcagcttgagcctaagaagaaagctcaggacctgttttctgagggtccacgagggtgtgtgccctgcctccatcacgaggcatctgagcctaccacactcgggactacaaggagcagcccagggggccacagcacccccctgggcagggctgcctaaagtgggggtgcggggtggagtggtggctgccagctggcgagcgcctgggcctggcagtgccgccgatcgcccactcgcaccagctgttagtttccatggcctgcccaccagctagccaggatgctgggcccgggctgccctggggtgtcctgccaggaagaggcagcctctaggagggtggcctgggcagaggggagggcagaggaggggcaggggaggatgaggatgccaggctggaggaggccagggccaccctccgctcacagtgtggcccggaacaggctgccgcacttccagcgcctcaggcgcctcttctgggcagtccatgaggggccggaggtggggatggtgcccagggctcctccctccgctcaaaacacccagcaacagggattctggaccctcgggaggggaggtgctccgaggtctgcgaccacaagagggcgcccgagcctcaccttgcagggagccaaggcctgaggcccgcggtggagctgtgcctgggagagggcctgggagctgggactgaatccctgggcgtggcatgcagctacctgcgtccattctcaggcaagaccccatccacactttagctcttttttcaactgatggcaacactacctgcttcagtatacgtctgcagagtaagcgcaggaacacgctgctgctaagtcgcttcagtcgtgtccgattctgtgcaaccccatagacgacagcccaccaggctcccccgtccctgggattctccaggcaagaatactggagtgggttgccatttccttctccaatgaatgaaagtgaaaagtgaaagtgaagttgctcagtcgtgtctgactcctagcgaccccatggactgcagcctaccaggctcctccgtccatgggattttccaggcaagagtactggagtggggtgccatttccttctccaggaacacactaattgaatgataacggtgatgtagtattttaccgatgaagagaatggactcagagaggtttagtgatttgcctaagtcacacagcagtaggcatggagcaagttattccctctggtgctgggtgctggcagagctttggaaagagtcctggcaccaactcacagggggttagcagcactcaagtcctcagggtagggaccaagcctgattctggctcccccaggtcaccctgtgccataaagaccagacccttttctgggcaattacattaatgaaaagaggtcccagctgtgagccctttacacacccatgaggcatcctcgtcctctgactcacagatgaaggaggaaggcatgagagaagttaagaacttgccagaggccacaaagcttagttccagtactttggccccagaatccaccctcccctcaccatgctatgtcctggggaaactgtttttcccaaaggagcttctggccacctccgtccctctcctgttcacccaacagctttcccacctattcagttggggcagaggtgaacaccaggcccggccccatggaccgaccaccacccaaggggagacagacaaggtgcacatgactcattcagggccggagggcccctaaccaatcaggggtgtcagggtcttctgtggggaggcaaccactgagctgagttgcaaggaaaaaatgtagcacaatggcccttgctggcctcccattctgggcccagggggagctcgtgagttgggagaaactggccctgtgtgggtaggaggagtgggcaccccaagggcgagtccaggctggttcccagcaccctccagcacctggtcatcacaaagtcatggtgggctcatcaaggaatcaccactgggttgtgattggttatgggtgttcatggagccaagccctccaccagccttcccgcctttctctcaggatgggtaccccctagggcttcctcgattctatggggaccagagttggcggggtcaccaccctctgggtacaccgggcacagaccattgggccaccaacgcagcacctggagcccagagctcagagtctgagcagagcctggctggagggattgggggcaccagccagggtcccagcctgctgccttttgcatcaccagcctggagcccagcccagggccggcacctgtgcctcaaggcaccttgaggacctaactgcgcccctctgagaccctcttcccctaatggggcagtgaaagcacagccagccccagtgctccctgaccctcctggtctctcagggcctcctgtgtggttctagaagcaggactcaggctgtggcagccacctctctccaccagtggccaccgacactgaggtgcagagggagcctgggggctgtgaaggaggctgctccccctcatcgtgccagcagtggtgagaatcagacttccccgttcaaggacccccagctgatgttctttgtacccctgtgcccagccaccccctgcccctcagttctggggtccgtcagcaccaacagccctctcctcctctgcactctcccagccatccccaccccggacattgcctgcccccagaaccgccccctgatatttcccccctcccacccaggactggcttctctgtccaccatcctccaccctccctgttgggctggcttcactctcctgaccccgctctctgacctcatctcacccccctttcctcctcctggactccctccttatccagcctatatcccaagggacctttctgcacccagagtctcgagcacaccgaccctcaaaaatctcccaccccattctgcaaatgcccagcctggggcagacccacagtgctcctcctagaggatcccatctgtccccaggccccagggtccccctcccttgtctctccccacttcttccttccatcaagaaacacactcacctcttgataatgatctttcaagctgctctcttagccctgcacatggctccaactgggccccattccttctccccagcctggtggagctcttcaagcgttacttgtgtgcccatctctgcctcctcagccccctgccctctgcaccgcagtccaccaaaactcttctcatccgtcactcctgctacatcccgagagagttgggttcccatcccaggctggggccagagagctgtgccctgctctccccctcttccctgccccctgctcgtctccatggccccacgccctagtgaaggtcccctggctgctccttactcccccagtaggtccttctgccatcctgtcccacagacgacggagctctcttctagccccacatgatcatcccataccactgccccctcttacccggtaccaatgttcccaaactcgccaaggcctgtctccacgcccagggatccaactgcgtcttcagtgtgggtcaactccatccaagtaacttaatcgtgacacagtaacttcatgaaggaagtactattattatccccaatttgcagatgggggcaccaaggcacagagagagttgcccagggtaaacagctgatcagcctctgaaccaaggtctccttcctggagatccctcaagagcctcagattcaccataaacagaacaagctcacgggctctgcactgaatgtcttcttcctggccaagctggcctttggactggacagtgacaagcgtctggaccgtgggcaattttactttctgtgggaagtacttaacccagagctcaacagcagtaagtggccagtacaggccagctgctgttgtcaccatggccctccaaacctcagctgcttctagaagatggggctattgggggaatgtctgagctcagggcctggccacacgggggagactatagccctggccactccgcacaagagcctttttgcagtaagtcaaagcagcatcaatttataatgctgcaagtttggcacaaatgcactatttttcttaagccaaaataaagctccaataagctgtaaaagccctggagttgggaggattctctgcggggtcatttagggtgagttagaacctgcagctgtgaactcctcagccacacatggcaacctgggtgggtacaccccagaatgctaatgaaggcagctgctcagggtcggggagccagctttgctctggcttcaggccccagggagagggaaagccatgtggggtgagacaggacaggacctcagccaccctgggctgcgtgatctgggccaagcccgggccccactccaagctgcagcttcttccgatggggttccgaagcatgactcagaagagggaagttcagggcctggggtggggacttcgaatgatgtgtgcaggcattttcattccttgggcagagatctcaggatttgtaatagtgttgtaggaaaaatgggattaaacatgccaatatttgcttatgtacacaaccgtttccataaagcaggattgtgccccatctcaatggaagcaaccccaaagtccttcttgtttggggcaggtgagcatatgggaggctggatttgatcccaaactctgccctttgccaatcatggtctccccaagggacggttccccttgcccgttccacaggtgaggagactaaggcctgactctaaaatgcagcatcttaacttgtgtatatgcatgtgacccagctcccagtctctctgacctctggcttggtgaggtcacctctgcccgaggccctgcaccctcccccaattccctggtgcctggcaaagaacccagatcttgaaactccagagctcagctctgcacatacaagttcacgatcagaaacaagtaggtaccctctctctgggcctccgtttcctcctctgagccttggtaaaatgagggtgatgatggtagctaccccaaacagttaagctaattcatgcaaaacacccttgtggtgcctggcacaggataagtgctcaaccagcattcaatccgttcaggagataggatctatgacttctactctgaagataagtaaacagagaattggagaggtttggccacttgtccaaggtcacagagctcaggagctgtgatggcagggggagggtgtgaggggggcacgagctgaggctcaaaccaggtctccttgtccccatcagggtccagatggaaggggagtcaccgagccaaagcccccagggcagggacagggagagaagggaaggaggagagaaacaggaaggctaccaggacagagacgggaccgggagcaagctactgcctggggcagagggcccaagcccgcaggggtcacggggcacggttccccgggctgacagtgggcactctcaccttcaccctgttctctggtggctggtgaccttgacaactcaacctgcatcactcacatcctagtaaggccctgaaggcagacgttttgggggtggctcatctacatgacagcctcccacaccttgagccagagccagggtcctgccccctcccctggagttcaggagcaccctgcccacccaggggctcccattctgggctgcaggggcaggaggtgagccggagccctgagaaaccaacagcctacctacctgaggtgacctccaaccaacctcaagacctagggcacctagagggtggggggagcctccacctacagcagccagcctccatgtgcccacccgcaggcctcgcccatctctgctgacagctgggaattcctgccgtgtgacccagtcagcctttcagggctgggatcctggcccagccacccagacacggttatagctcaggctgtgagctgcctatgaggccagggcaagtgattcccatctctgggacttggcttctccaggtcagaggagggatgagctgcgagctgaaacaactcttcccacccagaggatctcgggatctggaatcccagaagccaagtgttggagagaacttcgggctgcgatttcctaacactggcctgcagcctgacaaagtcagggtccccggggagtcctgtgaacatgtacacgcgggggctcccttccacccccagcagatcagcagatgcggagccgggtgttctgcagatttagctagtgccctgggtccatgccttctgctgactctcaggggtgggggcaggggaaggaaggggagggtggggctgagggttcttcccgagacaaggtgcccagggatccctgagcctcccaaaatctttactgcttcatcccttgagtgtcctcagaccccctcccgcccgccacccagggctggaatccagcctttgctcccatcagcaactcctccacagaattctccaccagcttctccccatcctggtcctcttcacccaggagaggccacagctactggcccttccagcttcccctcccactcaaatcaggggcctgctttttgttttcttcctctcaagcctgcataaagaacactggatttagatgaacagctctgtgcacaggccctgtctgggccccatgtaactgccaccctgttgagctctaacacatttcctccaccccaaagagcccccagtcaagccccctgctcactgcacctccccggcccccctcagcagacctctagccccacagattagaagggagaagcctctttctaagcagctcttctgtgctcatcaggttggactgaaacccctgaggacagcaactgggctgtcctgctggctggcagtgcctggcacagagcagacattcgggaagggctgtgagaggaaggacaaggtggctgcaggctgcacccctgctccagctgctgccgtgatgagtctccttggctcatcatcccagcttccttcaatgtctaccacactctcagcccccagccccctgcaggacgcctggcacatggacacgcaggtgcaacacccccacctgccccggccaggcctctgtcaatgctcagacacctctttccccacagggctcctgccccatccccaagccttggctcccagaatcctggaatcacaggcacaccgaattcctggatctgcactctccccagtgcctccagcccctacccactctggcctcacttgtcctggcaggctgtcttctgtccctgtcccagcaccgtctcagcccccacagcaactcagagcctccgcactaagctattagcaggaagtcagctctccctcatgcccacaggctcccgcatgtgacctgcgacgagcaccctcccctctccaagcctcagctcctccgtctgtaagacagccccatcaggctatgtggattcagtggactcttctggctctgatgtttcctgcagatcactgcccacggttagtgtaaataaacatttattagataaataactagccccaaagaatgagtcatcattgatggtggaacggtagacatcagctgcaggccacttagaggcagaattcaagagtggtggtgaaagctggattcagactgcctgggttggaaaccctggttcacgacttcctcatctgtaagatggagatcacagtagggcagggtgaggatgaagtgcgatagtgtacagaagcagccagaagagcacctggcacttaaccagcgctcaggagaacttagctcccactggtacccccagcgccactgtccctcagcaaggctcgggagtccacatcagcgacctgcgggtggagccaagcgtagcagcagtgcctgactagtgccaccagagggcaccatgacgcagccaaagccgcccagctgaaccgagggctccctgattcatcctgagtggcagtgccagccagaagcctcccagctgggaggacgagggtggggcctggatgcccgaggagttctttctgcaggagatgcccgcaccaccttggcttgatattctgcccattcctagcacagtctgtgaccaacagcaacccaaagtgtccctaatccttccctccagagccatcagacccatttaacagatgaggaaacaggcctgagagaggccagctccaggtcatgaggtgaactctggccttcctgctcagactgacctcccagtacaccccactaaacactatgggtgtggcgcccacccccacaaccaaagctgggagccagcacctgtgcccacctgacactccttgggcagaggagagacaccagggaaaaaagcacatctaatggtggggagacctcaaggacggagggcccggggaaagtgctggatgtgagaggaagagacaaagaaacacgaggcgaaacagggtggggtgggcacggaagacaggagatgcaggagagacattcgagaaagtgaatgggtggaaagagacagacaggggaagaggcacagagacagagaatcccgagggagaaggcaaagagagaagcagaggcagaaggacggagacagaggcagagggagcgattgaggaaaagagagatggggatggggtcatggtgacagagagagacgggaggcagacccagggacaaagacctgtgggcaggggaccctggagggccaccgaagcggcttcactctggtctggagcccccatgccctcctcccaggcactcagccagagctctcgcccttgcatttctgtcacaccccctaccccagcagggcttgccagacagacaccccctcttgggggtggtggttgagccgggttccctagggcatctaaggcagacaggtagggtccctggggccgtgttgctaggagatccagcccagggccccagcctatctcctgagcctctcctagggcaaggctcaacactcacctaggggctcacctgagacctggattccccctagctttcaccccgtctggccctggacagcctctgccctgcatcctcttggcagagggaaggcacacctggtgacccagccggttgccaggcctccctggctcctgccccaggccccggggcctgctgtgttccttagaagcactagattcccgggcttgggtgcaggtggcagggagattgttcaaatctcagcctgccttttaccagctgtgtgcccctgggcaagtcactctccccctctgagtcttatctttaaacaaaaataataacagtatccattccatagggtcctctagaggaggaagagccataatgagggcacagcaactgggatgggagactggttttaagctccatctctgagccacctgggctgcagctgggagcatctccccgcagtccctgtctcccctttgcacctccttgagcaggctagagtctgattcacagcagcctcaggggaaggggctgcccagagccctcccagggaactcagataccaggagacatgaacactaggggcccaggcaaaaccacacccacatggttgttcgggcctgtgtgctgctttggggccttagatgaaagcaacttcagggcttcccaggtggcgctggtggtaaagaacctgcctgccaatgcaggagacataagagacatgagtttgatccctgggttgggaagatcccctggaggagggcatggcaacccactcaagtattcttgcctggagaataccatggacagagaagcctggcaggctacggtccatagggtcacaaagagtcggacatgactgaagcaccttagcagnnnnnnnnnnnnnnnnnnnnnnnnnnnnnnnnnnnnnnnnnnnnnnnnnncagctttctcacttgcactgctgctgctgctcctgctaagtcgcttcagtcgtgtccgactctgtgcgaccccatagaccacagcccaccaggctcccccgtccctgggattctccaggcaagaacactggcgtaggttgccatttccttctccaatgcatgaaactgaaagtgaagtcgctcagttgtgtccgactcttagcgaccccatggactgcagcctaccaggctcctccatccatgggattttctaggcaaaagtactggattgggttgctattgccttctcctcacctgcactgcaggggagttgaaaaggatgatctctgtctgtctagcttccaaggaggcctccgactgttacctccggtattcacacccctgtgtaatcactgaagagactgaatcagtgtaacagatggagcggcgtgaacgtgagagtagggctcccgaagcacaggacagggaggctacgctgctcctctgatcacaggctctggggaccccagtcgccatgtggtaaggatactcaagcagcccagtggagaggaacggaggcttcccaccaacaaacagtaccaaccagccaggtgagggggttagtcaccttagaagcagatcctttatccccaggcaaatctgcagatgaccccagcccctgaccccagccccagccaagatcttggctacatgagagaccctgagccagaaccactcagctaagccaatcccaagactcctgatccctagaagctctgtgagataataaatgctgattgttcaaagccacaaagttttaaggttactggctacacaaaataaagtaatgaatatatttccaccttctgctgcctacccccagagttctggtctgaatcattggtctttcagaaaagccctaggttggtgtcaccaatgtcaaactcaactaagttcagggaggagctcatcatatccccccccatctacttccacaattagccattgccaacggacgtcctctagaatcaaagacagatacgtggtgtgcattattgttcagtcgctaagtcatgttcaactctgcagctccataaactgcagcgtgccacggttccctgtccttcaccatctcccagagcttgttcaaactcatgtgcattgagtcagtaatgccatccaaccatctcatcctctgtcacccccttctcctcctgccctcaatctttcccagcattaaggtattttctaatgaatcagctcttcgcttcaggtggccaaaggattggagcttcagcttcagcatcagtccttccaataaatattcagggttgattttctttaggattgactggtttgatctccttgcagtccaagggactctcaagagtcttctccagcaccacagttcgaaagcatcaattctttgctgttcagccctctctgtggtccaattatcacaaccatacatgactactggaaaaatcatagctttgactagacagacctttgtggtgtgcattattgccttccttatcccagcattcagccactgacaaacttggcctcttttatctcctgcccatctctagaatcctccctctctttaccaagcctaggtgccctgccccagctcaggccacaccctctcttgccagttcagcggctcctctctagtctccctgcctccatccttgctgctcttaccacccatccatcctccacactggccgctagagggagggacttcctaaaacatagatctgatcatgatgctcacctgctcattaatcttccatggctcccctgttgcctaaggcccgaactccttggcctggctttgaaggccttttttcatctgcccctaccccttacctctccatcctcatctctagtttttctttgtctcagtgttccattgatactgagccacctgcaattcttggaacacaagagtttcatacttccacacctttgctcacacagttctctccacctggattcccctccccttctttacctggaaaattcctactaatctgtcaagccctagccgtctgattctccgtgaggagctggtctctcactgcatcttattggactacaacaaactgtttacatgtctattcacccacaaagtgacaacctccaaagcaggatgtctttttcatctctatattcctagtaccttgctcagtcccagcatacagaattccataaagttcttaaaatggaagacctttagattgaactttaaggtcaactcatttaaaaatcattttggatgggaacacctctaaaaggtattacagactctcctacctttttaaactagtttatgggacatgattgaaccttgctcgagtgtatggtttatgtcagtacaaaccccgggtttttcagaaggagccttggaggtcatccaatagaggaaggacctcaggtctggaaagatcacgtgacttgcccaaggactttgcatgacgaacgttaatgaacatctgagctgcaagacggtgatctctttgctttgatgaaggatgtcaagcccttgccttgccacggcactaaatggcccctttagtcaatgtctttaaggtttctgtatgttttagaatcatcccatttcagcactaggccagtgtacctggcccccactttacccctctagtttgttacttctggtccactggaggcaggaggatcaggtaaccaaacttgatggaatcacacggaaaggaagagttacagccctggcctgagacctgggagcactgctcctcgggggagtgtggcgggacgatgggactttgtggccctcctgcctctgctgtgccccagatatgacagttgtcgtgaggagagactgaaggcttgggctggttctggcggagggaagtgtcagcataaccaagagatcctgcaggcaattcactcccaggtagatgactccacagggaggacaaagaggcggatcctggaccctgggctccataagctcccttcccacactccctcatcagagacaaagtgcatagtgcaagaggcaaaaggaagcagggcctctggggtggggtggggagagggggnnnnnnnnnnnnnnnnnnnnnnnnnnnnnnnnnnnnnnnnnnnnnnnnnnactggataggtgggaatagctctgtttatcttatccagcgagcaaacgaatgagggtggaacaggaagcaatgaactaagagatgaggattctagtccagcttccactactaactggatgcatgtcaaggggcaactcaactagtcaatctaggtgtccgtttcagaatctgtgaagtggggatgtgtgtgaaagttttagtcgtttagtcatgtccgactctatgccactccatggactgcagcctgccagactcctccgtctatggaattctccaggcaagaatactagaggcggtagccattcccttctccagggatcttcccgacccatggatcatacccacatctcccacattgcaggcagattctttaagatctgagccactagggaagccctgaaatggggataattcctacatcatggggttatagtgggattaacaaaaataatgtaaaaaagaacttagttctaaagtgctgctcaagggaacatggccttcattcacgcattgcacaaacacttactgattacctactatatgccagctgttccaggaactggggctgtggccatgaacatgacaaagcccaggtcccatggagctgactttctggggcgggagacacataaatgaataataatgtactaatcagtatctcaataaaggacagaaacggtatggacctagtagaagcagaagatattaagaagcggtggcaagaatacacagaagaactgtacaaaaaagatcttcatgacccagataatcacgatggtgtgatcactcacctagagccagacatcctggaatgtgaagtcaagtgggccttagaaagcatcatgacgaacaaagctagtggaggtgatggaattccagttgagttatttcaaatcctgaaagatgatgctgtgaaagtgctgcactcagtatgccagaaaatttggaaaactcagcagtggccacaggactggaaaaggtcagttttcattccaatcccaaagaaaggcaatgccaaagaatgctcaaactaccgcacaattgcactcatctcacatgctagtaaagtaatgctcaaaattctccaagccaggcttcagcaatacgtgaaccgtgaacttcctgatgttcaagctggttttagaagaggcagaggaaccagagatcaaattgccaacatctgctggatcatggaaaaagcaagagagttccagaaaaacatctatttctgctttattgactatgccaaagcctttgactatgtggatcacaaaaaactgtggaaaattctgaaagagatgggaataccagaccacctgatctgcctcgtgagaaacctgtatgcaggtcaggaagcaacagttagaactggacatggaacaatagactggttccaaataggaaaaggattacgtcaaggctgtatattatcaccctgcttatttaacttctatgcagagtacatcatgagaaacgttggactggaagaaacacaagctggactcaagattgccgggagaaatatcaataacctcagatatgcagatgacaccacccttatggcagaaagtgaagaggaactaaaaagcctcttgatgaaagtgaaagaggagagtgaaaaagttggcttaaagctcaacattcagaaaacgaagatcatggcatccggtcccaccacttcatgggaaatagatggggaaacagtggaaacagtgtcagactttattttggggggctccaaagtcactgcagatggtgactgtagccatgaaattaaaagatgcttactccttggaaggaaagttatgaccaacctagatagcacattcaaaaacagagacattactttgccaacaaaggtctgtctagtcaaggctatggtttgtcctgtggtcatgtatggatgtgagagttggactgtgaagaaggctgagcaccgaagaattgatgcttttgaagtgtggtgttggagaagactcttgagagtcccttggactgcaaggagatccaaccagtccattgtgaaggagatcagccctgggatttctttggagggaatgatgctgaagctgaaactccagtactttggccacctcatgtgaagagttgactcagtggaaaagactctgatgctgggagggatagggggcaggaggagaaggggacgacagaggatgagatggctggatggaatcactgactcgatggacgtgagtctgggtgaactccgggcgttggtgatggacagggaggcctggcgtgctgcaattcatggggttgcaaagagtcagacacgactgagcgactgaactgaactgaagcagtatctcagtcagaatgggcacaactatgttgccatcaatgattcttaaagccactaagagtcattttcactcacactgtatgttcttggagaaaatgcctgtaaaccatttcaagctgcccccatctagggacccaggctgaaggaggctccatcccgaacttccacaaaagggcacatggcaagtagcaccaaagtccaaaagccccgaccctagccctgaaagtacacagatcacgactatcccatttcacttcccgccagctagtaacgtggttatgttcatcttctgcaagaggtgggggaatgcagccctgctgtgtacccagaagatgtatgtaggtgcagtgtatttggtagacagcactaatgcccattatggatagagtcttggctaagtaccacgaaaacaaatagtgtaaagagatgtgaggttggggatgagggagtctgggaaaggcctcccgaggaggtcacgttcaaacaaatatgtaaacaaaatctggagcaatcccagaggaagagcacaggaacgcaagggaggagtgagtgtcctaggacaggtggagagcaaggagcccagtgggctggggcaaggagccaggggcagtgttgtaaagagagaggcattcagggaaggaagcagaccacacggccactaagtcagccagggcttggtctttcctcggtgagatgggatgttgttacagggggctgcagatgagcagaacctttagtagataaaagacaaacagtccctggtgccagaatgcctgcggccaaagcccagctccatcccccactagcacaagaccatgggcaagttacttgatctctctgaagctcagcttcctctccataatcagataagatcagatcagatcagtcgctcagtcctgtccaactctttgtgaccccatgaatcgcagcacgccaggcctccctgtccatcaccaactcccggagttcactcagactcacgtccatcgagtcagtgatgccatccagccatctcatcctctgtcattctcttctcctcctgcccccaatccctcccagcatcagagtcttttccactgagtcaactcttcgcatgaggtggccaaagtactggagtttcagtttcagcatcattccttccaaagaaatcccagggctgatctcctttagagatcagaatggaccttagaatggactggttggatctccttgcagtccaagggactctcaagagtcttctccaacaccacagttcaaaagcataatagttgaggttaatacaaagacctacctcccagggttattgtgatggtaaaatgcttaaaacagggccagtgacaggaatggagactcagacaaagagagcagacttatggacacgggcggggtgcggcagggagggtgggacagaactgagagagtacattgaaatacatacattaccataggtaaaacgtgtcccagggacgggggagcctgatgcgctgccatctatggggtcgcacagagtgggacacgactgaagtgacttagcagcagcagcagcagtctttatcttggagaaggaagtggcaacccactccagtattcttgcctggagaatcctacggacagaggagtctggttggctgccttctatggggtcgcacagagtcggacacgactgaagtgatttagcagcatcagcataggtaaaatgactgtggctcagatcatgaactccttattgccaaattcacacttaaactgaagaaagtagggaaaaccactagaccatttgggtatgatctaaatcaaattccttactattatacagtagaagtgacaaatagattcaagggattagatctgatagagtgcctgaagaactatggacagaggtttgtgacattgcacaggaggtggtgatcaagaccatctccaagaaaaagaaatgcaaaaaggcaaaatggttgtctgagaagaccttacaaatagctgagaaaagaagagaagcgaaagcaaaggagaaaaggaaagatatacccatctcagtgcagagttccaaagaatagcaaggagaaataagaaagccttcctcagcgatcagtgcaaagaaatagaggaaaacaatagaatgggaaagactagagatctcttcaagaaaattagagataccaagggaacatttcatgcaaagatgggcacaataaaggacaggaatggtatggacctgacagaagcagaagatattaagaagaggtggcaagaatacacagaagaactacacaaaaaaagattttaatgacccagataaccatgatcatcgtgtgatcactcacttagagcgagacatgctagagtgcgaagtcaagtgggccttaggaagcatcactacaatcaaagctagtgaaggtgatggagttccagctgagctatttcaaatcctaaaagatgatgctgtgaaggtgttgcactcaacatgccaacatatttgaaaactcaccagtggccatcagttcagttcagttcagtcgctcagtcatgtctgactctttgcaaccccatgaatcacagcacgccaggcctccctgtccatcaccaactcccggagttcacccagactcacgtcctatagagtcagtgattccatccagccatctcatcctctgtcatcaaccttctcctcctgccccctatccctcccagcatcagagtctttccactgagtcaactcttcacatgaggtggccaaagtactggagtttcagcttcagcatcattccctccaaagaaatcccagggctgatctccttcagaatggactggttggatctccttgcagtccaagggactctcaagagtcttctccaacaccacacttcaaaagcatcaattcttcggtgctcagccttcttcacagtccaactctcacatccatacatgaccacaggacaaaccatagccttgactagacagacctttgttggcaaagtaatgtctctgcttttgaatatgccatctaggttggtcataactttccttccaaggagtaagcatcttttaatttcatggctacagtcaccatctgcagtgactttggagccccccaaaataaagtctgacactgtttccactgtttccccatctatttcccatgaagtggtgggaccggatgccatgatcttcgttttctgaatgttgagctttaagccaactttttcactctcctctttcactttcatcaagaggctttttagttcctcttcactttctgccataagggtggtgtcatctgcatatctgaggttattgatatttctcccggcaatcttgattccagcttgtgcttcttccagtccaacgtttctcatgatgtactctgcatagaagttaaataagcagggtgataatatacagccttgacgtaatccttttcctatttggaaccagtctattgttccatgtccagttctaactgttgctttctgacctgcatacagatttctcaagaggcagatcaggtggtctggtattcccatctctttcagaattttccacagttttttgtgatccacacagtcaaaggctttggcatagtcaataaagcagaaatagatgtttttctggaactctcttgctttttccatgatccagcagatgttggcaatttgatctctggttcctctgcctcttctaaaaccagcttgaacatcaggaagttcacggttcacgtattgnnnnnnnnnnnnnnnnnnnnnnnnnnnnnnnnnnnnnnnnnnnnnnnnnnnnnnnnnnnnnnnnnnnnnnnnnnnnnnnnnnnnnnnnnnnnnnnnnnnnnnnnnnnnnnnnnnnnnnnnnnnnnnnnnnnnnnnnnnnnnnnnnnnnnnnnnnnnnnnnnnnnnnnnnnnnnnnnnnnnnnnnnnnnnnnnnnnnnnnnnnnnnnnnnnnnnnnnnnnnnnnnnnnnnnnnnnnnnncttgatgaaagtgaaagtggagaatgaaaaagttggcttaaaactcaacattcagaacactaagatcatggcatacagtcccatcacttcatggcaaatagatgggtaaacaatggaaacaatgagagactattttcttgggctccaaaatcactgcagatgatgaccgcaaccatgaaattaaaagatgcttgctccttggaagaaaagctatgaccaacctagacagcatattaagaagcagagacattactttgctgacataggtccatctagtcaaagctatggtttttccagtagtcatgtatggatgtgagaggtggactataaagaaagctgagtgctagagaattgatgtttttgaactgtggtgttgaagaagattcttgagagtcccttggaccacaaggaaatccaaccagtcaatcctaaaggaaatcaatcctgaatatacagtggaaggacggatgctgaagctgaagctccaatactttgggcaccttatgtgaagaaccaacacattggaaaagaccctgatgctgggaaagattacaggcaggaggagaaggggatgacagaggatgagatggttggatggcatcactgactcgatgaatgtgagtttgagcaaactctgggagatagtgaaggacagggaagcctggtgtgctgcagtttatggggtcacaaagagtctgacacaactgaatgactgaactgatatctaaaatggaaagctgctgtataacacaaggagctctacctggtgctctgtgaccaggaaaatgggagggaggttcaagagggagggaacacatgtatgtgctgtgctgtgcgtagttgctcaatcatgtctgattttttgttaccccagggactgtatgtagcccagcaggcttctctgtccattaaattttccaagcaagaatactggagtgggctgccacttcctcctccaggggatcttcccaacccagggatccaactcccatctccaactctgcatttgcaggtggattctttagcacagcaccacttggaaaggtccaccaccacgatccaacaccaacagagattcatctcccgtctcttgaggcccagagcctgccagacatgagtctttccccacctctcctcagcctccacatctgctaggagggagcaaccctccccagctgtctaggcaatggagcctggagctccctggggagcacagtctctcctcctgccctgcgcagcaggtgggtgctcccacactgcaagacagatttctaattgcctgcactttctgccctctatcccagggcggggggctggggaagctctgggtccctcccctacagtcaccccccagcttcgttctggcagctaagctctctctcgggcaggagctggcacctcacccaggaggggagaacagctgcggagatggtgggagaattcctcccgctgctggatttgtaaaacaattgattaaagacaatgcaattaattattccttgatgaaatagtggaaattaccccaagaaaatgaagatttcagcagcagaacattaaatccctctaattatgtcatttctaaaaaaggggggagggggataaaaagggttgaaatggtgggccggagggaggaaaaaagtgtaaaaatagatggggtgactctggggctcctgcagggtgagcaggggcaatagaaggggtcaccgccctggcccggaccacattgtttgaggggaaagtctgaggtgacagagctctcggcgggggacagcaagcagccgtccagacactgggatacgtgccttgggtgcattagcaaattatcctcactctgaatcccggtgccttattcccgttgtacataggagagaatgaggctcggaagaggcacgtgacttgtccaaagatgagctactaattagtagagacaggccgtgaacttaggtttaactccagaaccggtgctttttcaaccccacctgctgcagtctatggcagtagccactgcagatgcccttggcagaagtggctgtgaccactagctccctgagggtctcagtggctcactgaagggctgggtgtggcagggagggtagctgccaggtgttgccatctctgccaataggaattgggcttgagctcccctgggaagctctagcccttcatcctctctgacacccctgggcatacttttggaagccagggaggggtggcaagtgggacctgccaggggcctagcctggcctggttctctctccctgggagacccagatgctccactagggtgctgatggcctaaattccaatctggccttgctggggttgccatgtggcctcgggcaagttcccttgccttcctggacctcagttttcctatctatattaggggatataagatcagtgcacgtatgggtccatttgagggtaccagatccagctcttcctcagctcagtttcaagaagccagaatcagctctagagtgggcaacaggaggaaacagacaaggggaagtttgagagccagcaaagaggaactctgggttctagcttctggggctaggctaacaggaatcaggaggaatccaggaggtctgtaagggggcagtgggtggaaggctatcccaggagggaagagtgatctgagtgggaggacagaagaagaggggcctggattgaagttagaccactaccccccattcctgcctcaggacaccaatcaaggggacccattgcctggaatggctgggcctggcagggcctaaagcagaggataattgattctcagcatcgctgaggttctttttagagcttgctttgtttccctcctcttggaccatatctgagcatatcccataatttttctggacactctcaggcactatcagtctcatttttatgagttaaaatttccaatctaatctagcatcaaaacttcaatttctcattcaatctaaagatttgctctttccctctctagctcaggcccaacccagcctaagaagcattcaaaagggatggaaggcctggtcctccaggatattggggctaccagatcctctctgtgcagtatttttggtgggactttggagtccccctcactgggatccttcagctagtaattccctgacatgtgcaatgatgctcctgcttctggggctcatcccactcagtctccaagaggtcacctggcctcaacaggcaggcccttccttcagcatgccttggtgtagccgctccgacccacagaagagcctgggcttgccagactatccccaccatcctagacagctccaagtcaccaccctcttctagactcttttcaagccagagtcaggccttggccactgtgccaacccaatgcttggggatacatgtcagcttttccaaatgtttcccctgaagctcccactgctcacacaatcaaggtgagggtagcagggcacagtcctcactgcccatctccccctgcctcacctcctcaccctcacttccctctgtgtagcctggaagtaagtagtgagggtcacagaaccaacttgggggcaccaaccttgcaaggcctgaagagatctacatccccatttaaaatgtgggagttctgggcactagttactctccaagcactccaagtacgccgtgtcccatttggacagcctattatgaaagcaagcctctgcttctccaactggttctgcctccttctttggccatacccctgtccttgtcacctaccccaagtcccaaccctctctctgtggcaggaccctacagcctcatgtccactactgagaagcacattcactccagccatcctgcagtgcctggatggagattgtggccccaagcaggctgcctgcaaagccaggcctcaaacctgggtgccaactcacaggccaatgcttcttccaccagctcaacccttggccatcctctctccaggagggatgagctgactgatggagcggctggggcagggaagagtcctttcccctctcgacaccagcagtggttcctacaaaagcaaagttgggagtttgaatcctggtgctcctactccccagctggctgattagaggcaagttgcctcatatttctgcaactcagttttcccccctgtaaaatggttatgataatactgaacccagagggttgccaggaagggtaagggagatgaggtcctagtcaggcattggcacaaagcaggttagtccccttaggacccctcccttgcagtcaggataccagggttccattccaaacccagagactaattttctggcagaaatgggtcttgaacttcccatttgtgtccaggaaagaaaggccacagagtggtgaggcagaggtgggagtctgaggggttaaggaggggaccctggaagagagactttagcattaggggtggtaggggcacagctcagatgggaagggctgttcctccccacccatctgctcccagacccctcccaccagagatggcattctagcccctcccacagctccagcacagatggcaggaaggaaatgccaaggcatggaggtagggaggggccaccaagcccccggaggctccagcccttgccaagtttcccagaggaggaggatgcaaaagccccctcccttgctatggcactgccctcccagagccacagcccactgatgccctggtgccttgtatcccgttgtcatggtaaccaggactagctgacgtgccgacaggcagaccaggagccgctgccacatgaatcacttgaacttgatgtgacagacccaggcgggtggcctgcacagaggcagagggatgtggtgccctgtgggcagggacggctcaggctgaatctctccaactgtgacaggtttaggggctccagaagctcatnnnnnnnnnnnnnnnnnnnnnnnnnnnnnnnnnnnnnnnnnnnnnnnnnntttcctgccctcactgagcttatgttctagtgggagaaacagacccaaaacaagtacccaaaccaacaaaatgccccaggaggtgatgaggctctgaagaacacagacaaggaactgggctgcagagcaactgggccaagggcttattttaggaaggatgatcagaatggattttctgagaagatgacatctcagctgagacctaagtgatgagcaagggctgaactctcaaatgaaaaagagagagttccaggccagggacagcaaaagaagaatctgagatgtggttgaagcacaggaggaggaccactgtgaagacagtagggcagacaggttaagtgtgaacggtgattttatcccaaatgcagtgagtggtggaaagtcaaggaactttgaataaagaagcaccatgatttgatttccaggtacatgctacaaaagctctagctgccgagtggagaacaggccttctgcagcaagcccaggaagaagcccgctgcagaagtccagagcacagaggagggtgctgtgaacccacaggcaataacagagaaggagagaaatagccatcttcaagaaaattctcggagacagaaactccaggacttgtttctggtccatataagagaggtaagggaaaggagagaaagaaagacaacatgtgggcctctggtttgagtttatgggttgtttgctgttgttcagtggctaagctgtatccgattctttgtgaccccatgggcagcacaccaggcctcccttgtccttcactatcttctggagtttgctccaactcatgtccattgagtcgatgatgccatctaaccatctcatcctctgtcaccgccttcttctcctgccttcaatctttcccagcatcagggtcttttccaatgagttggctcttcgcatcaggtgtccaaagtgggtggttagtggtatcaatttctaaaattaggagaactgattagtttgtagatcatctgtaaagacagggcttatgttcacgagacaagtccaaggggctaaagtcttctctgaagggtggaaaccacactcctaacagagaaaccttcaggatgggccacttcctctccactgtccccaggcagtcccccagcctttccaaaagaagtgtttggagaggctacatggccatggccctcggtgagaactctgttttgaaagtgacagaaacctaactctgaatttcataggcacaaaggatgatttagtggcttgcagaatgcaaggaattaacccatgggaatggaccagagagcagctgggcctgttctcctctctgcctctccccacatcccagcttttccattccaaccacaaaccaacttcttccccaaggcaggaagcactgaatcctcaggatttttaaaaaagaggaatcaacttttttcaaaattgtttttctcttcaatagaccacctttggtctaaaaatattaagaaatgtgacaatgaagtttgtgaatgaaaccacgacacaaatggagtagtttgtttactactcaaaatcacattagtaaaaaacttcactcttctaaaaatgattcacatacaaaagtagtaaaactagtctaaaacaggaaaaatataatgtgaaaaaatttataaaagcatcctctcagtttttatattctgtaacttccaatgactctcatttccagttgaaaaacttaagagaattttaattggctagggttgaattatatgctactgttgggcccatcagctttgccacgggtggggtttctataagaatatgacagctcacactatgtccacagctcacactaaggaagggctatgatgcccaagagacagagatgattagacaatgctcttttacatgatatgggtcagcagaattcccaaccagagagatgaaagggaaccatgagaacaaggaaaaatttgcaaattttggagaactgagcagtttttacttggagttccaggaaggacagccagagaaatgcccacggccctcaaagctatctactgagagcagaagataaaaatcattgtcctgatggagtttgtctgtgtgtgtgagaaaccagaggggcagtgtccagactcgaactggttgagtagggttccaatgatgcccaactgtaatatctggtaaacccttatctccccccagagactggcgttgccagtcaaagagcctgcagatggaacctgaattggcaaagcagacagaagtggaaggtagtcagtcgattgccttccaatgagtgggaggctctcgagcccctcactagccatgcagtcttggataagttagatttcacatctctgagcctcggtgtgctctgattttaaatagtgaatgtgcaaaaattaaagaaaatggtgaaagtgtaaaattaaataaggtataaaggagagtgcctctctcataaggtcaagtgaagagatgatgatataatgcaaggaaaatacctgctacagaggctggcacatagtatgtgcccaataatatcatctaatgctttcatcactgctacagaggaggtgtgtgaagtgggtaggtctgagagctttccgttaacgtttaaaaaaatatttatttatcgctgtgggtgagctttctccagttgaaacgagtgtggtctactctctggttgtgcagacttctctcattgcagagcaaggactctagagtgcgctggcttcagcagctgtggcccacaggcttagttgccttgaggtgtatggaatcttccctgaccaggaattgaacccctgtcccctgcactggcaggcagattaccagggaagtccttccattaacttttgagtgcctcctagaggacagtttcaatatgggaggctttcattcttggcattgactccaccccaggcaactgtaatagcaactttattctctgatccacctgctaagtgtcaggcactgggctaggtactttacctctattatctcatttttgagcattatcagcaatgactcgagacagtgtatcagttagcttctgctgcataataaaccacccccacactcatagcttgtaacagcaaccccttacaaagctcatgattttaaggttgggacatccagcgaggctcttctggtcttggctgggcctgctcatacatctgcagctgctagttaagtggctccacttctgggagttgcctggctgtcatctgggtgatggggatgactgagccatgtgtcttttttcatccagcagagtagcccgagctttttcacagagaagctgggcagggttccaagagaacatatgaaagtgtgcaagacctcttaaggcttgggttccaaactggcactggcgcttccaccaccttcaggtggccagagcaggtcacagggacgtcccagattcaagctggtggggagaagcttcacggtgagattgcatcaggtgggctcagaaagaggcggagaaatgtggctgatcttgcagtatcaggctttccttgtgactcagctggtaaagaatccgcctgcagtgcgggagatctgggttcgatccctgggttgggaagatcttctggagacgcgaaaggccactccagtattctggcctgaagaattccaaggactgtttagtccatggggtcacaaagagccggacacgactgagcaactttcactttccttcctttgcagtataccactggtatactacaagataggtactggtattactgccatttcacacgtgagaaaattgagactcaaaggggtaaaaatgtcttgccccagtgatgctgctagtaagcatggcagaagcaggatttgaacttggggggtctccacactcaactgcattgggacatgcaaactccattctctcaacggaagcacccttgtctggcacagtccacaagggcccaatctaacaggcaccagaggacttgactgagatgagggcggggcgggagcaaataaagagatgaactggaagaaggacaggagcaagggattcagacagagcctgtggccacgacaaggatgccagcttggcgacgtggacatcagcctgcctcatgaagccacagaactggacaggccaggccagggctgaccttcttccaggcagaaaccctgcctgcacctcacgctgacagggccctgcggtgagcctacggtaaaggagctgcctctgctgcctgctgccgagtcctcagaccatgggtggtgacagtgctggccagaagatcaaagaagtgtcacaggtgaaagcagagatctgttctcctgtgagcattcagagcactccaagctggtctctgtgtctgtgccgagggtgagcagagagacactgggctggccgtgaggcgccccacctcctcacctcccctgtgaccggcccctcccccacagagaaacccacgccaggagcacagctgtgcccagccaagctgccgggtgccaagccgggcctggcgggctccctctcatctgtctctctttagcaggaacaaatgggaatgagggaatcaattaacaaggctccttagccaaatgactgctgctccctccttccccagcctgttaacccttcgctgccagggccgggaagggctgccccggctggccgaccgcactcagccctggggcccccatctggatgccgcgctcctgccttgtctgtgccaagtgctggcagcagctgccaagctgaggaaccagagccagaaacacagacacctccattcaacctcagtggaatctggggtcaggctcaaaggatcttcagggcctccggcctggccctttcttttctctccagagacccagggcctcctcctgcatcaaaaaccactgagaagaaggttcaggccgggagggtggctcacggccaaacctgacctggggcccctactgggtctaggaaagggtaggggcccaggggacagggcaggacaccttgggccacactcaggaagccctgacacctcgaatgtcaggagcaaatggtcagtctaagaatcctctcagcggaatttggacaggcaactgtgggggcctggttgtcaggaggcctgagttcaagttccggcttaacagctgacatggggtctgatgatattttgaatgattaatcaataggccactctttctcccacccactctcaccaaatgtctttatttgtcctccaagggtcttttgtctttcaccattcccactgtcccttccccacccaaccccaacccgccagccctgcctcagtagtcaggctttggtttgagctgctgctgctttaccggattcaggactgccatgcaaagcctgatccaccatatgctgcggcactggggtcacagagaaacaggggtgtgctcttggccttttttatattcaaaagatactcaggttctaagttcagaccaaaaaactcagatgcagctcacatggagagaaccacctgcacccaccccctggattggataaaagactccaaaggctggaagaaggtggcaaaggggaccagagaggacatgtcagcaggaaggactgcctacccagccctgacactggagagtgagctctgggcccagcaaggcctgagacacattcatccatccattcattcattcatttgacaaatggacagtgactactttctgtatgccagacactgttctgggcacagtggatgagcaacaaggaccctggccttgggcagggtgaggctgaggacatgagagtcactcagtgatggccctcagccatttatccagcaattgtccagcaggagggaggctgttggtgccctgagttttgcctcagcagcaccctaggtcacccaatggacacggcaccatcctgcccggcttctatccccaggacacttgtgagccacctgggtgaagatgggtcctagacaagcaggggatgataagaggacgggaggagaggcctgagaggagactgccagcaagccaaggtcatgctgaagccacaggactgcccctccctgcccctaacacattggccagtctcctttctaaaactcaccttgggcccaagttcaaaactccagccacaactggcctggtgtgaatcagaagcccatcactaagccaatcagcactgcccaggagtagggatctataaacaatggcagctcccattcccagagcagggtgagcatggggggaaatggttccctgaagacaaaaccaccaaaggccacaatactgaccttggtcgggcaggtggaaataggttgagcctcacttctctgacctgtaaaatgaagctgatgagagtgccagcctcactgggctatctttagggttaaaggagcccattcagatgagagcgctttgcacacaacaggtacagaaggaatgagagtcaattctctgtcctcagtcactccctctctaaaatgggtgggtgccctggctcatttccccagccctgatgtcccaggatcccacagccctgagcctccatgacaggcatgagcgatcacagactctcctctcagaggtcaggatccccttctgttcctcaggactgggaaaatcctctggctgctcttcatcttccccacttcagtctccccaggccctatgactgtcccccccaccccccaaccctctgagtttctgcctggagaagtggatgtgccaatgtgcagagcttgaaccagagttcagatcccagttctgctgctgcctcaaggctggatgatcttggtcaggcttcttcacccctcagtgcctctgcttcctcatctgtaacagagaacttaactacaatagacactgccccgtgggggcgctgtttctgtgtcgggccctatgcacacgtgctaagtcacttcagtcatgtccaattctttgctaccctatggactgtagcccgccaggcttctctgtccatgggattctccaggcaagaatactggagtgggttgccatgccctccttcaggggatcttccccacccagggatcgaaccagcgtctcttatgtctcttgcattggcaggcaggttctttaccgctagcatcacctgggaagcccttaaggccctataagtatcagctattcaggttctcatctctgttggctcctggaccaccccattgggaagtagcttggatggtaggagtgagccaagcactgggcacagaggggtgccccagactgactgctgccaccctggcctccttgagttccccacctggtggaggcagacgcatcagcaggcaatctcagtgcagagagaccagggccactctctagggaagcctggggagaagtgtgcacaagattggcccaagccaaggagggaaaccaaggcctgctgggactggtgacaaccggaagctagtacaagtgggctgggtgaaggggggttcaggataggggtccaagcagaggggtcaactgtatagggaactcagccatgagagcgggccaggagacagcatggaggacccagggtgctggcagctgcactccagattgtggagcctcagggcctgcctcgcacaggactctgtgtctgggtgtgactttgtgtaatcgactggggctgtgtgtgtatgtgtgtggctgtgtggtggctggtgtgcttgtggatttgtttctgtgagggactgtgtgtgacagtgtgaaatagtgtgtttcgaagagggcggagcttggcatgcctgtctgagatggtttagggggcgatcactgcggctgaccactgtgtgtgactgtgtgtccatgggtgtccctaaggtgtagataagtagccgctggctgtgagcaggactatatgcatgtatggtatttataggtatatacatggaaggtgaatgtgtgcgtatctctgtgtaggtgtgtgtgtgtgtgtagacatgtgtactgctgtctgtggagtccagggcaatgagagctgctcctccttccagcctggctgcacacgcacgggcgcgcgcgcgcgcacacacacatacacaccacacacacacacacactcacggggctgggaggggtggctgcccgttgctgccacagccagtcagaacttgctaatttgcatgttaatgaagctcgggagctctccagctcgagactgacaggagcccccggcgcccccccacatccttccctgacgggcctgggagggggggagtggggagggctgagaaccggcggagggaagaagaggcggaggaggctctcactgtagcttccctttctctctccctttctccctctcccacccctgtgccggccccaggccccaccacgtgtctgcccgcccctcagccccccttcactctccctcctggcccagcacagggagagggggctggggcaaagcccccggggcaatggcagaggaggctgccaaggttcccctgaggtgaggctgggttgcctacccctgcctctcagggagcacccagcagaccagccataggcacccacccaggagcagacaccccgggatgggacatctgagagtggaggggtgccaacacaggcaacaggccgccctcctgtctcccccgcccccgcaggcttcagtgcggccaaggtgggtcaccacgagctcttccgcctgcacccccgagaaagggtcagtccatgcgaggtcagagctcccgcccagggcggggtggggggtggcagggatggcacgaggactctggagatacaacgtggggggagggactggggtacacatggaaggtgcctccctccccccagggctgtgctcgcagggaaggaaggctgggtggggtggtgagtaggagatgggagccctcacagctttgatcaacaggtcagtcctggttgcgcggctgtctcctgctcagtctgttccttaccgcattcttgtctgatcccggtccttcaccgtcccatccccctaccactcctgccccatcccctccttcctttcttaatcagccacatcccacaggaggctgagctctctggggagcccttggcagccgcctcctagaaacactgtctggttttgtctcagaggtgtgtcccctgccttgacagagagctggtctgggctgggggtcctggctcctgccctctcagcctggctcccaatgagcattttctccttcctctgccttcccttccccaacattgctctgggcactgggtctggctccctgcccctctgtctctccctgagcccaagtctctatctctccctccttttccccagatgctcaaatattcatcttctctccccacccccagtctctctttctgccttgccctgtaggtctctaaacacccacccctgcccctactcccatctccccctgcccccccacccccggtggcaggcctggcccccaggtgtgtctttgccagagaggggaggcagagaggtgaggacccctcaggccctgaatctctgcaggtgagaggggagctgggcagttgctggtgttaattgcagggaggatgtctggcagaaataaggtggtttttctgcttcagtgacgactgttacaatcaaattgtccacagacaattagcggagtgggagaaataagaattagatttctaattattttcccagtaaaagccgccctggaccccgtgggtgagggggaagggcttctcagtggagccaacaggcacttttgtaggccctgctccctggggtgggggagcctcatgggagctccccaggcaggcaggaaggggctggaaagggcagagaatccggacacttggatctcagaaccagccgccatgggacttgctggcacttctcattttttgagccttagttttctctttccagaatgggggaacaaccattcctaagtagcagaattgttgtgaggagtcaaagaggtgaagcagcccccagtacaactcacgactcacacacgcctctgtggacttgcaagctcgcacactcacacactggggaagtttctccttccaccccctttgctgctctgggtctgtgtgtgtgacacatgccggggactcagggaaagggggcctgaacccaaggagagcctcactcaacagcgtgtgcctccctgagctgtgagcctccatctccacatctctcacatgaggttacgcatggtgccttccacctgggctgaaatgaaggttaagtgacacccacgatgggggcgagcctcagacctggccccacggcaagtgctcagtaaaatgaaagtcctatccaagggggccagcccgggcctgcggggctggacacagggctctgtgcagagtgttctgggtccaccagacccaaccttcctctggggcctaatcactcagagaagtgaacagaaaaccaagccaagaaggacccaccctacggatcagatagttctgggttgtgtctgggctgtgtgctttctagctagtcaggcagtgtctacatcccctctctgaacctcagttttctcttctgtaaagtgggacaacagcagtggcttcctctaggagttgctccaaggctgtgacattaatttgctcctggtaggtgctttaggagcgggaggggctagaggcacaatcgccctgactggaacaccatcccccatcccccacccttgtcctgcacagagtcaaggactaagggtgggagcctccgggttgccctaggcctttaggacctactccccatggagcagagggaacacccagctcactaatgtcctcagggcccagactagtgacagtcaacacacctgcacacagaagcgcccatgcaggtgccacacctgaccgcactcttgctgtcacgtttgtgcatgcatctcaaacgctcacacgcacacatacacccttcctgatgcggccagaatgtccccatatgaaccaaggggaagctcctggccacacccacgggggatgagccgggagaggcagctgcaagccagctgtggggtctggagtgggcgaggggagctgcttggatacccagctgggagtcgggcaggagggcttctcagctgtctcttggctccaggcccccttcctacctctgggggccagctggcccagctgggcagggtggaggtcacctgcctggaggtgcctgtttctctctgcccctccccgcggcctttcattcagcaacaatacctgggaccccgcccaccttctgtgccatctcccccctcccttcccactctctgtctctctgtctctctgactccttctgtctctccctgggtccctggatcttgtctctctgggcctgggtctccccgccccagtgctgggctatgtaaatgtggtatttcccgtgtctcatcagcaggactgcctgcttggctcacatttaatttgatccgtggcggcgcctctgcggagccactcatcaaagcgggaagacaattaggtgaatgtcagggtggcctaggccccacggggtgaccagggcctggggctggggccatgaagtgtgaggggcaggggcctggctgccaccctcatctccctcggggcctgtccagacttggcccaacgtctgcgggctggccagccgcctggatggcccctgtgaagaccaagctcctctctgcccaggacctgcagcactgaggaactgaggggcatggctggagctcctggacttggcagaaccccctcctcacccccaaaaggaggcagctgtgtggctacagtcaggtggactcctgggctgggccctcgacaggcctggtagagggtctgagctctgagctagctcagggtcccctgagaagggaatgcattctttccaccagccccgcccggcgcgcccttgctggcgccaagccagcggtcctctcctgagcctcagcttggccttttctcctccctcctctgtgttgcttcctctccttctgtctttctttctctggctgttattgtgtctcttccccctctctacttctttcctcagtctcattcctttattcccaacctctccttttctgtatcttataccacccccacccacccccatcatgtccttggcctcctgggaccctttagcctcagctgctcatctgtaattccccatccctgtccctggctgatccttccccacctgaggctgacctgctaggtaaatctgaactccctgccccagcctgacttcctcctcactgcccccgaccctcagggatccctgaatctctgacacctccctccctactggcttcttcatgttagctgtcaacacattcaagtctctcctgttttaaaaacgataataataataaaatgccttttaaagagatactctccttgatggccccactgcttcctccacagcccctttctctcctctccctctagggaagcttctgggagagcaatctactcttgcttctgacccccttccaagctggcttcgggaccacccctcaggccctagaaacagtcctcaggaaggtcaccagcaaccttctcatcactcagcccccttgatcacacctcacttggatgcccagacagcatctgaacaactgacttctctcttcttgactctcccttattcacacaatgcctctgggttttgcctccacccctttggcctgccccttcctggaccccacctctgccctggcctcacagttgccctccagagccatcccagctcctcttctccattcaccctctgtacagctccttaagtaatttaacccatgccctgctcccccgacccaggcttcagtcacacttgtgtctacacctttggccttctgctctagcccagctctttcttctgcgcttaggacgcaactattcactgcctcctggcccctccctgcgtgttccatggccctcccaaacccagagcagcccaaaccctgacctttcaagcctgtttctccttttgggttccccagttggatgactggcactttcatctcccagtttcccaaatcagaaacctggaggtgaaaccagagctcctttcccccaccactttcacacagtgggtgataacagacgacagagtctgcctccaaaatatttctcttctataaagccttgaaagtccaccctcactttccccatcctccctaggcagacctgctcaagccaagatgttctcattgttcccttggaggcatcttaatgcttttccacctgcaagtgtttactactttttatccccacatggaatgcccactttctcttctttgcctaacccatgtcaaatccatcttgcccctcttcttaaaagcctagctccagccccctgcaaggaagttctcttccctccatcccagctggcagaaccttctcccaccctaagctcatgaacccttcttgtctggtgcctggacacacaggatcatctccgctctttctcctatatacatggtctcctacatttcccaggctccttggtaagtgggccatgtgaatgcttctggccaatgagctagagataaaggtgaaatggtcacttcccagccaaagcatacaagagctagtgtgcaatcttctagctgccacagcaaccaacctctttggagatggtagagcctcaagatcaaagcagcatggaaagctgagtcccctcatgaaggacaagagccctcagatgcctggtcctgcagcagactttgtttaagcaagaaataaacttttgttgtgttcacccactgtgattgaggggttgttggttaccgcagcatagcctttcctatcctgactaatacaggccttttggagtgttattttcccatctcttgtctgaggataacattctgctctcactgtggtagtgagaattaaagtattaaaacatccacattcagcttctgagtgcctgctgcatgtcagactcagtataagtacctgactatgagatctcctagctggaaaagtattatgaactgaatgcttgtgtcctgaccgcccccctcctcaagttcatatgttgagacccactactatggtgtttgaaggtggtgggcctttgggagataattaggcttatatgaggtcataagcgtggaaccctccgtgatggtattagtgtccttgtgagaaaaggaaaccttaaggaagccattgcaagccaggaagcaccaaaaatcaaatttgtcagcaccttgatcttggacttcccagcctccggatgtgggagaaataaatgtttgttgtttgagacacccagtctatggtactttgttacagcagcccaagcagactaagacagcagggctccatttatcagagagaagagaagatagctacattcagctgctcaggttgggtactgaacaatcccagcggggaggggcactggcagagattataatgtggaagtcactccctggagctgtgaactgtagaaaccctgttgtcctcctagttacagtgttgctttaaatcactgataaacattgacactaattttgtagttataaagaggaagagttggggtggggagggggcttgaaaaaggcacgggagaaacaggaacaatgcttgtaatttcatagtattaataaaaaataatgatgtcaggaaaatttcacatcgtgctgctatgtgccaggtactactccaaggctttcatttacatttattcatccatttctcacagcagccctatgagataaacatcatcatcccccatcttacagatgaggaaattgagtcagagataaataacccaacatcacgtggcttataaatagcaaagctaggatttgaactggggcttccaaggtaaagaacacgcctgccagtgcaggagacataagagacgtggattcagtccctgggtcgggaagatcccctggaggagggcatggcaacccactccagtattcttgcctggagaatcccatggatagaggagcttggtgggctgcaatccactgggtcacagagttggacacaactgctaagtgacttagcacacatccacaggatttgaatccgggcgttttggtttcagaattgctctcaatccctctcctgttcgggctcctaaaatgaggataatgtgcaattcctcccccacctagggcctggcctggatttgagcttccagggttaggatgagggcaaatgctaaagcaactgattttatgagggtgtctgagaggacatgtgcacagctctctggggcccagggcacaaggcacagagctgagcaggaactcagcccccttcaccacttccattcctgtaacccccacctcctgctaccttggcctccgtacagaccccagaagcaccgtggcatccaaagggcagggcatttgaaatattcaggggccacccctttggcctggcattgatgggagggacagaagggaagattctccacacatgttgaagggtggcagatgggcataaacaggagtttgggcaggacaaattccaagcctgaatcctttgagcataataataaatgcaaatgtgacctctcacattctcaaaggtccttcagcttgtgacatatcatgctacagacaggaactcattcagttcttatatcaacccatttcacagatgaagaaaccaagcatcagagaacttgaatgcccagagtcattcagccattaggtagcagagtctggcagatccagggttcacacaatgtccacatctccagctacccccagaagtgccagtcctcttgagagaattccccatgtccccaagggtacctcctactgggaaccagggtatccaggtctcctgcaacctggcaggggtctgtctactagggtgagcctttgcttcacccgcccacccgtgtgctagggacagaagggggactttatgtgcaatctgcctgactctccagaaagcacttaggtttacgatgtgcatgaaattgatcgccagttggcgcggcccccgcgcgctcagtgccagcccagtgctggcaggaggctgccccccaccccccactttcaaggagcatcaaagccgcctgccaaggcccctcgtgagggtccttctccactaacaagtgctgagtggcggggggagctgtgcccaaagacctttccacagcacacatacccccgccccacagtagttaaatagctccatgttttatgccaattcctgcctcttctgcttcctctctaacaagctgatgctttcaaaggccccactaattggtgtttgcacctcacacaccacgacactttgatagtcacttaggacatgggtccgtccatcacacccttggtacagagggtggttcacctccctgcagcaaggtgcccagcctgggtgctcctgctcctgtgcgcacacaggagagggcccgcgtgccttatgctgtatgtggaggacacgtctgcacatatatgtgcacgtgggtataaaaactccttcagaatatctcttgtgtatattcctgcttgcgtgtcagtgcgcgtgcatgggtgaacactaccatctgtgcgtgtgggagtatgcagtgtgtgcctgtacatttccctgggcgtgtttgtgtacccacgtgatagagcttgtatgtgttgatgcatgcactcgtatgctttgcatgtttgtgtgtggatatctgcttgcaggcaggccggtacttgggaatttttgcaagttgactaacaaggtacatgttcatgtatccatgggtgtatgggtttgcatgcctaagtgcaggggagggtagacacgtccatctgtgtgcccatgcacaggcagggtgcagggatgagggaatctctggttgggcaatctacatagcacgcatgtacttgggcatatgctgtgtgaagaaaaggtgtaatacaatagtcaagggcccacaggctttgggttcgagacccggctctgccactttctagctgtgtgactttgtgatgaccactgaacctctctagtcacatctgcttatctgtaaaatggggatgataaaagcatctgtctcatattgctgttctgagaatcaaatgagataatacacgtagagggctagtccgatcttctctcattgctgggcacacacaaccccatctggcctcaacacggagttgactgcccaggagagaccctgggcacttggggagagaaatggccagccccagaccacacagtaacagctacaacctctgagatcttcatcacatccaaagtgatttcacacttttattacctacctttgaataggtgggaaactgaggtgctgaagtaggtgggagtcggtggcagagcaggaacttgctgtcagaagacagcctacagctgagctgtgggaagctgggatgtccctcatttccaagggagagggggcggcttcagaaggatggagtaatgcacacacccgtgcgccctatgcaccaacacacgactcagaacaaaggggtttccttacctgtcccagcctggggtgcctgcctcgggggagcatccctgctggggactcaggctgagtactgccacccccagggtgcccagccatgtcccttctgtaaacccagctgtagttgtgtctgatctgtgttatcttctcaccaagacactgaggcacagagaggggaagaagcttgttcaaggacatgggacagaaaagagcagaagcccccagcaggcaggccaggattctcatctcttgctctcctccttcaccatgcagccttcactgcaccaaccaggctggcgaatcaggggtcggggcaaagtcctccccacggcaggtcatagggccttcaaacccacccaaaggtcatattttgcagggtgatttttttatgctactttttaataaaattttaaaaacatgaaaacttaaaatcacaaccagtagcagcagcagccctgcttccttgccagtcaacattgcctctgtcattaacactgccttccccctgagccatcaccctctccagcatcagtctgactgtgcccccacctccaactcccaccccttaaactgtggttacccccagcccttcattagtgtctcggacttggccccaaaaccaagcagaaatggttttctgccaccctttgcatttcatttctcctcccaccctcggggcttattccaggatcatctgacctgaagcccttcccagatctgtaaccctccctgctcccctgagcccctggcctcgcctgtcctgcagaaactgcgggctgggctttggccctgaaggcctcactgggggctggcagccaacaagggagccaggaggggcaggagggccaagcagccccctccccaggcctggcgccccacccacccagccggcggcctgtctgccttcctgagctcattaactgcaggtcaccgttcagcaggaaagacaaggcgtgggttctgcgggcgttcattagccgtgagaggaacagtgtgtgtgaaattagcagtcacctgaggacctcgataatttcataattaggaggcctaatggctccagctctggatgccaaatgacttaaccccttgcctgctgagctcctaacccccagtccaaggctgcagtcccctccccctgtgcctcagtcctgtttatttccaccaccacggtgcccagcaccagagttggcacaaaggggctgtgagagcaaagttgatggagcaaatgaatgaatgaatgaatgaagacgtatctgaatgggaaaagagcttcagcccccactgcaggtgatcaggggaggaatgagtctccatctgtaggcatagatgtgtggttgtgtgtgtgactgtgtgtttgtgtgcacgcacacacgcatgtgtgggcataagggcacacacacatgtggatctctgctgtccgcttctaagagccttgtgtgtgtctgggtgcacactcacatctatgatactcattctgctgcctcctgtgctctgcaggtgctctgcgatgaggccccatgtgcctccttgaagtcagcctcccttggcaccgcctaaatactggtgactccataatttctatatggagcacttggaaggaaaagcaggcctcgggagcttaacctgaacctgcatttgcatagccaatataccatttttatttagactgaatgttcatttggggggctggtgttaataaagacagggggctaaagccatatcgtttagtatggggagctatcctgacagcctccaaaaccccccagcctctctcagcctgctcttcttcctcccaacctttctgtggccctgaagaggtgggggctgaggtggaaggcagatcacaccggggtccaaaggctggatcaggctctgcctaatctgggaaccaccgattctgaggatctggtgaccccgcctccctccgcaaatggtggagtggtggttggagaagaggtgagtgtggtgaaagaggaggggaatgagaagagggacaggaagaggttgggggagaacaagaaagggatgggagaacagaaggggaagagggcagaaaggatgggaagtcccaaggaggtgagagggaaaaagagaggagagagaagagaggaggggaggggcgaggaggagaggcaaggaggctgagagcattatcagcacttaaaaagcgagcagctcagttcttctttggcacaaataatggctttttatgaataaatcatgtgtcagacgcctcccagggagtgggcatggaggggggcgcgtctgcggggctccgaggctggcggggaagggccggttgcagacccccggctacaggggtactgcccgctttctcctcatggggcccagcaggacagagctgtctctggaattaccactggcctgagccaggaggagatcagcccttcctctgaggtggtcccgctgctccctgcgcaggagtccagcccatcccagggctgggagtgtccctccgctctgctaccctcccatcgcagagccgcccagaagatgctcctggaagggggacaccagctctcatccaccccgagagagggggtgggccaagacaggaagacacacccagagagggaggcgggcagtgcacacaactcacacaggcatggtctctaccacccggggcgcacatgtgggcacactcggagatggaaacactgtcattcctaccacacatacacacatgcatgcgcacacacatacaaatgctcagacgtgtgcacactcagacagggagaccccaaccaaccctcagcccaccctctctcccagcacacttacacttacacacacacacacacacacatgggcccacacagacagatgcatatggtgcttcatggacacacacagacctgcacacgcacatgcatgcgcacacacatacaaatgctcagacgtgtgcacactcagacagggagaccccaaccaaccctcagcccaccctctctcccagcacacttacacttacacacacacacacacacacatgggcccacacagacagatgcatatggtgcttcatggacacacacagacctgcacacgcacagcagccacccacactccatcagcctagggtgggggcagttttgcaacccatctggagcccagacccagctgggctgtccctgagtctgggtgtggggtggggctggggcatcagtccctggagagagctcatctctgtggtccccacccagcaaggatgacacctgccacaccccacagggaggtcctgccatcctgaaccaagaccagaaccagtacaggctctgctggctccgatctccttgactgtctgctcagccacctccagtcagtgggtgccacaggacagcctgggcagctctgccccttgccaggagtttgacctcggggaataattccaatttcatatgcccctgaaaacaaatctaagataggtgctactgccccatcttctagacctagaaactgaggctccaagagtaagagcactgggcatttctttcaaagaccatgccctttcacaaactctaggagcccacagtgtcctggtcttccttctctccctgtgccaaggtgttctgaggtgctcacctgagcagacctgggtggcccgctcctcccactctgcaccatcccccaggccactcccagcacctccgtgacaacctccacactcttgcttctctgacctccctgtccagcccacaccttcctgggcttctgaccttattatccagctggacatcactgggtcaccatgttgcccaacgccagggaatgccattcacgcaatacatacgttcccaaacattccccccaaatctcaaggggtcccataagacacactgaaaagtcagcccataaggctgagcgcactgtcttccccaggactctccctgcgtcagagttctcaggggaagagccctgtctgcccaagtgcccaaccagaatcagacatcatttgatcctcattccttatgtccaacctacaaccaagtctcaatgactctagagccaaaatatatgtgtgaaattatcctttcccctccagccccactgccctcccttgtcccttctcgtgtgagtcaccaccagcacctctggcctagccactggccctctcccattgttgtcccttctggtctacctgcctccctatcactggtcatccttctatctctgagctctggccatgctaaattgctttttgttctggaacccaaatgatcccttgactctggatctctgatcaagccattccctctgtctgaattctttcctttcccagtgacaactcaccctttaaggcttggctgagacagcacccccacccccaccccaggcaccttccctgagtcctcaagcccaagatgtgtgcagctgtgtcattcgattctcctccattcattacatctctgatctaaaattgcccattaactcatctctgtccccctcaaacctcttagttccttcagagcagagactgtgcctgtgctgctctccggcagccccagtgattggtatgagacctggcacatagcaggtgctcacgaaatcttccatggatgaacggatggatgagtgggcacaggacctgtgctgccactttgcatatctcttctcatttactgctcacgaggtgtgccagccaggaaagcaaggttacagaggttgaaaacttgtgcaaggtcacacgactggaaaatagtagaggataaattcaaacagaagtctgtgtgccttccagggcctcctttccaccatcccagcctgccttgccaggccattttcctgctccgactctattttctcatctgtacaatgggaacaaaaattacacctaacccaggatctgacacagacatgctctcagttaatatctgtgccttctcttccaactctagctttttggggacagaatatccccagaccagaaacttcccgcaaggcacatgttcacagaaacaggtggagagtccacccaggcacatctccagcatccagaactcagtaggcgcttaaccaatgtgtgttgagcagataggcgtccgtgaatgctgacacagatgcagacacaaagtcacaatgggctcaggcacagggacccccgcctccccgatccttgccaattatctgcctccgccgccgctctcctgctagcccaaggcgcgggaaatatttaaaacaattttattcatgaaaatatgctgtacaatgcactctacacggcctcgacacggcacacacgcacacgctgacggcacggccacggtacactgcctacgatatgcgccggggacaccgcgcccacagcccgccccgaccggacacttataaatatgggagagaggagccaggactggcacggagaaaggggtgatgggttggggagtggatccagagctgaggctagctggagaggctgaaaccagtactgggggacgggcaggggtggaaggggagagggacttcgaccgggaggggagaaacaagggcaggcgaggatgagtgggaagggctgaaccgtgggggtggaggtcggagggtggttcaggacttgaaggacagctcaaggtgaacagccgataggtgagtgtgggtgtgttttcaggagaggggttcctggcttgaggtgggtgacgcaaagaccagtgggaaagtgtcaatagggaatcagccccgactttgggtgggcgattagtcactcgagagccctaccaatgatactgaggattcggagacgcccccctgtcgcatctcccagtctgcttcccagaccagcgcgtcccacctcattcctccccattcccacccagccgggaacccagcatccaccccgcaggcttcccgtctttgggaggaggcagagctggcctctggggcttgggcaggaatagcagggtgctccagcgcctgcctaccacttccctcagcggtcagcttctgcgggctgtctctagctgggttggggctgcctcctggatccccccgtggagcggaaatgggaatggggacccggggatcaggatgggaagacagaggcccctgggggggtggggtgcggggcagggcacctggggcgcgcggcaggcggccctcagcctggcacccagctctggttggggggcggggctccggccaggccgggcggcggcggcggcagggccgagtcgaagttgaagtccatttcgtcgctgtccatgaagtcgttgaggatgatggactcgacgtcgcactcgaggctcccgctgaacatgtcgaggtccaggtcggccgggaagcggtcgggcgcggcacccagcggcccggcggcggcggcggcgtacggcccgggcagcgcgtctagcaggaggccgccggggggtcccccgaagacggccgcgtgtcccggcggcgccagacccgtcgcgcccgcctcgccgggcagcgtcataaggctgatggggtgggctaaggcactgcgcgagggcgccggcggcgcgtacggggccacccctttgccagggtaggtgccggcagcgcccgccagcgccagctccccgggtgcaccaagcacggggccggccctgggcgcgggtggnnnnnnnnnnnnnnnnnnnnnnnnnnnnnnnnnnnnnnnnnnnnnnnnnnnnnnnnnnnnnnnnnnnnnnnnnnnnnnnnnnnnnnnnnnnnnnnnnnnnnnnnnnnnnnnnnnnnnnnnnnnnnnnnnnnnnnnnnnnnnnnnnnnnnnnnnnnnnnnnnnnnnnnnnnnnnnnnnnnnnnnnnnnnnnnnnnnnnnnnnnnnnnnnnnnnnnnnnnnnnnnnnnnnnnnnnnnnnnnnnnnnnnnnnnnnnnnnnnnnnnnnnnnnnnnnnnnnnnnnnnnnnnnnnnnnnnnnnnnnnnnnnnnnnnnnnnnnnnnnnnnnnnnnnnnnnnnnttttgcacgcggataaaccgggtgtgcagagacaggttgtgccggatggagttctgtggccagagacaaggacaggggtggaggagtgggcagtgaggggataaatgatgggaagaggagtgggagaaaatcgaggagaggaggagagaaggcgaaaagaaacgccaagaagcagaaggggaggaaagagggaagatgaaagggtacagcggggaagaagggggaacaggtgtaagtaccaggtaggacaaactcagaatatccatcccccaccccagaaccgccccaccctccctgttcgcagcccgcacaggcactgtctgtaggatggggccggagctttgggtctagtcttgccagggaggctactcttgaggagccgcctgcagcaggggagcaagacccctctccccaactcagccaagctctgcccggggctagccaggctgctagggccccccaacagattatgtaagggctcatgccgctgcggctcatttgtccgccccccccccccccagcctggcgtggcgccaggagcccgaaaacccagggctccagaaatcaatctcgcggtgactgattaagccctgtttagaactaattgctctttcgtgtgtggggagaataaattacctgctttaatttcgtgtctttaaaatgcaactgcaggtagagaagactgttaaccctttgctggaagggtctggccaggataagcagaatcggctgggtgtccccaaggtgggcagaggcccacattttctccccaattctcggagcttctgcgaactccactccgatcccaggacacccctcaaagcacatccatcagccgtggagacctcaaaccccacagctgctcagtacccaccttcaggtcagcccagttcctttccctccccacccacctgatgcaaagtagctttgccctcaagccccttcctgcacaaaatccccacaaagcaggtgacatcatgcccatttacagacaagaagactgaggctcagagagatgaagtggcttgccttaggccacaaagctctcctgctgtgtctggtccttcctcgggcttcaccttagccacacctacacatatcttcttgtaaatttctgttgggctccatatcactgcctacttttgccaggcctggcctggggacagagggaggcaggggagtccacagctccactgacctggctcctcacagagaacatggaggactagaactactgcagagcctaccacgccccacctctggggcctccctgctggaggcctggactccctggctctggcactgttgtggaaatagcaggggtttgggtatctgaagggctgggcaggatgcctggctcttttcagccacctagctatgtgaccatggctgttgactcaatctctaggagtgcatacctcagtgagctgctctgaaaaaaatgggcaacatacagtaaccacctcggaaagctgttagatcattacctgagataatgtgcatgctaagtgtttggtgttcataaatgttggtcaaatccctcactctggccagaagacctcacttcttagatcactccacagacttactccttctctacaattcttaatatcaggccctgagtgtacctgcgctgggcacaaacaactctggggagctggcattaccccatctcctgtaccagggaatggaggcccagaggcatgatgtaacttgcccacggtcccacaggcaccactccaggtctgcccagcatacggacctgctctcatccccccagccccagaacctctgatccgtccaggctctccctgctgcctccttcccacctgactgcaggaggggtcctctctgctgcccagggcgcccacttgcccctcacccccagcaccaggcacgcacctgacttcttcagggccccaggctccttatctctggcactttctggtcttgggagacaacagctggggccccaaggcccctcccagcattgccctgcctggctcctcctggggccctgagaggaggggacccagacccccagggagtggtgctccctggagtagaaacccccctttcctgctcccgcccctgcacctggctccccagcccctccccaacacctgtgttcagggacctctgaggcctcagttctcaacccctgtgggactaactgcctagccagaggctccacctcgcagcccctccagctggaggtcagtcaggccacacctctttatccatgtcactatgtgccagcccggttctgagtgctggagggtgggaggagaaggaaggatgtcaccaagtagggcatctcctgagtacctgccgggtcagccctggtattgggagtattttatcccattctcagtactttatgatcattctgtcagtgttcatataactcagggactgtgacccctatctcaagatgttctagggaaatagcaacccactccagtattcctgcctggagaatcccacacacagaggagcctggcaggctacagtccatggggttgcagagttggacatgacttgatgactaaaccaccaaccatctcaaggtgaggtgactgagagagattacgtaagttgtcaagatcatacagttttaagtggcagagccaggcactgatttcaggttagactcactctgagtctaaaggacctcacattccaccatgggagagagaacaagtcagagaatttccaaagaatcttaggaaaccagtcctccatttcttctcaaactttccatgatgtaatcaaccctagaagctggtagcatgggaagctgggggcatgttaaaaggtcaaaattctctaagagtcttgcgtttcctttttagaattcaagggaatcttggcttgtattccacgagacttccaaattttctgaatatcaatacaaatgttttagatcaccgtcaagaacacacattccaggcctatgaaggtctctatccttccccactctgttccttgcccagccaggtacccctaagccccagcctgaaaccacagctggttggacccagagagaaaaaaggacttgccctgcatcacccaggacctggtggcagagctgggattcaagcccaggcctcctgacctgcagcttggtgctcctccctgtcctccagcaagcctgatctggggccactccctcttcctctctgggcctgtttccctccccagaaattgatgagatgggccatgcactctaggcacctttgcagttgacaacgaaaagttcttggaattgttcaggccaggggttttcaaacttttttaagtagtggaactcttgtagtaaatggaatctaacacaaaacatgagtgttccgcactcaagccactggggctggggtgggggtaacctggaaccttttctgctcagcaccctcccttggcactctcacagaaaatggcccttggcgaggaattctgcaggccacctggatggggttgacgcttagtaaggtgccattctttgcccaaggtcacccagggaggtggcccagagctaggtgaggacttaggccttggtctgctgagcagggctcttcaccaggtgtgcaccagggctgtgccccaggaggccaggccaggccctgcagctcattctggctcctcagggcccagccacctggtacccatcagagctcccggccaagatcctgtggcaagcactgatcacatctcacccacacaaggcctcctgggaggccagaggccacggaggaggtgagggagggggggcagggagacgcctctgccaggtagcagtaaccagggttccctctcagagttgcctagcaacccgccaccacagccaaggccccggcatgcccaggctcccctggtgcccaagctgggcttctggggcctcacacctcccacaccttcatgcaggcctggtgcagtttccaggatgggacctccctgacttggtgcctcagcgagactatcgggggtgggggcagagggaagggacagggggttacatcccagcccctcctactgtcctgcagaacctgggtgagaggccagcctgctggggcctcagtcaccagggcgaggaggctggtgcaggacaaagagcagggctctggtgttggatccagattccagtcgtggctctgacacccacaagcagttgagctgcatgctttgaacctccagttcctcaaacaggctacctgcctccacccttgtttcccttgagccttccaccaggcagcagccggagggatcctataaataacccagatcacggtccagtcctgcccagaacactcatatgcccccatctcactcagagtaaagaacaaaggccttaccatagcccaccagcccctctgtgacctcctaggctcctctcctgacactgtcctgcttgatccctcccattcttcaaaccttccaggaacctgccaggtaccatcccaccttgcccagatgcccatgtccatctctcagctcaacaaagtctctgttgagatgccacctgcgcaatgagacctatcctgtccgctcttaacagatgttcctctgccttgccgtttcttggctccctaaccctgctctgagtttttctaaaacaattagcactttctaaagtactgtataatttctttatattatgttcattaatttgttatctgggttcccttattttagaatccaagttccatgaagcatttctgtccctttctttttcttaccagaccccatgtgtttggtgtatgccaggcgtttcataaatgtttgttgagtgaatgaatgagagacagcaaaggagggtaacatagtcttgcagggagaattaatgagattggcagagtgacttgcacagaataggggctgctccaaactgagagaacacaggacagaatgggaggcaagcaggggtagagaaggcaggagcatcctgggccacagaaggaagcacagagaggaggaagggcttcggtgagagggaaagtagggctcccagggtgaacaaggcagctgcccaccctggccccctacctgctcgctcctgctgcccgaacagatctgggtaacccagggcttgctgcggccaaggtctctagcagcctggaccatctgagccagaagatgctccaggagcccccaggggaacagaataacctcgtccttgctgatggtgcctcccccatggacagggtctgagctgtttggtggcggcagctcatccatccaacgggacaccctcatctattcccaggacacccttcgcccacgagcagtaatgcattcatctgacaacacaaccccatttatccagcacaccagtcccatttatccagcaagtacaacctcatttgctaacagcactccattcacctgacgggccccctcatttatccagcaggacaccctcatttatcctccaagtcggaggctctccttcctcctgtggtgtggctgtgttctctgatggtgcaacccgcctgatccagcaggacgtcatctctcctacaagtacacttcatcccctgatactgcaacctcatttatctaataatgcagcctcaccttgcctccaagtaccacctcattccttgacagtacaacctcgtttatcttccagctcaacctcatttctcctcccagcacagcttcattccctgatagctcaacctcatccaatcttacttctccagccagagcccagcagatctcagggctggggagtgggggggaaagaggaggggtttggagcaagaagaagggtcccaccatttgctgtccctggcctatggagggctgcctggcactatgactatatccaatcttcccaggcccctggactttgagttctaggttgcatggtccagccagtgctccaccattgccccccacctcctgtttggtccccttgatggctaaagagaatccacaggatggatttttttttcccagctctccagcaaggaaaaaactccacctgattagatttgtagcatttgctggtttctgtggcatgaatattcccatcgtagccaattttaagctggcagcatgatgtcactgagcgcagaactgggaagaagttctccctgatcagctctcacgagccagtgcaagcccactctcacacaccactggcacacactcacataccaaggcgggagaagggcaccacctaccacgtgccagacctaagctaggttcttcagatacatttcttctgtgaattctaaaagccatccaaactgtggattcagttcagttcaggcactcagtcatgccgactctttgcaaccccatgaatcgcagcgcgccaggcctccctgtccatcaccaactcccggaattcactcagactcacatccatcgggtcggtgatgccatccagccatctcatcctgtcattcccttctcctcctgcccccaatccctcccagcatcagagtcctttccaatgagtcaactcttcgcatgaagtggccaaagtattggagtttcagctttagcatcattccttccaaataacacccaggactgagctcctttagaatggactggttggatctctttgcagtccaagggactctcaagagtctttctccaacaccactgtggataggtaatgctattttatgaagtgggggtggagaggggaactaaggctcaagtaggttaaatgactcctgagaccacaaagctgggaagtgatggagctaggtctgggtctcagggctcttgtattccaaagccaaggttcttctcactcacatccctaatgaggtggggaacgctgccctgctacccacctcagtggccatccctgccttgattctcaagcccaagcttcctggctttcatcagagacaggagacccaagtgttacgctgcccacccataacaagccctgtgctaccccctggcctctagtaccgaggggatcccaggactctcccagttcagtcccggatcttgtgtccatccatccaacctaaaaccaggtatggttgcctctccaggttccattgctgtccaaggttctgcctggccctgccctcaggaagctggccccacctacccaatggggatgtgacccagctcctccctttggtgcctcccagagcagagatcacctgtggggctgcatgagtgctctgattccctctgtgactcctgtttcctctctccttccttccttccctcccttcctgcatgaagaaatactgagggctagaattggaatcccagcctcatccatgtgaccttgagcatctcctgtaaaagacagtaactatcccaacatccatgggaaagggagtgaggccgggaagggcatgacatcccacatcttatgatcttatggagtccctatctcaggcccaggagcaacccttgtaccaccctaaatcccccacccacctctgacccaggaacacacctgactcagagagagtcacaaaaccgggggttgggggtggggaatctaggtaaggaggagggtcacttgctctgctgcttggagtactcagtccagacagacttcctgggagaaggagtgacctagatgacctcagggccctgaggccacatgcaaacccttggtactagggtctgcagggaaggaggggtggaagtgcaggcaggagcatcagagccacaggtgttgacaggtgaatggcttggagtcattagtggaacagaagtgggcagccaggggccaggaggaaccaaatagccaaagcaaggcaggaggtcaagagacaggccctggcatcccccacccctgccaccccagagacaacagagcccacacactcagcctggacagcaaacaagccaacagcagaagtcccagctcacccctactcaaagacccagggctcctcatcctccagactgacaatcaagggcctctgatgctctccagcctcgtcacctccattgcttacacccacctggaactccagccaccctggatatctcacatttcctgcctttgcacactgttccctgtgcccttctctctttctctgtgcacctgggtcctgctctatcaaggcgagctttgtggtgtctttcccctctgcaagcccccaaaataactattccctccccatttctactgaaaaaatctacctgtgcactagagtgtaattgtggatgagtctgcctcccaacttgaactttgtgggcaatccttggctcacggtaagtcaatacatagattggaacttcacggtaagtcaatacatagattggaactttcagcagccatgaaccactcaggcctggcaactttgccatttctgttccgccaaacctcaggctgaagttccaggtattggctcctcctcctcctggtttttcctccagttcctggtgcctctgccacctccctactctctgctgactcctccggagacttcaacaagtggagaaggaaagacactacgatttgctgagcattcacacacacgctggcactcaacagtttaagtcttactgagtatctgtaacaaacctctgagttagtttattattctgattttacagaggagaaactgaggcttcagggaacaattgacctgctccagggataagtgttgcggcaggaattcacaccagggtctgtgctcttccgcctaccctgagacacctctaggcgagcctaggccagacagaaactctcctggggaaagggtgccaggaactgccacgctggctcagcaacccctgcacagatctcctctctcttccaggattaaaggggatccccagttgccaagccattcaggcccctccgagcccctcctcattctgatcccctccctcactctgctggcagcacctcccacacccctgccccaggccttgggagcagctgcagtgacctcacccggccctgccctgagcccagctctggggagggcttagcagctgtgccccagccctgcaggcggctggggggcagggggtggaaaggaagagtgggcatggtgccaagagaaccatctgctctcccaggggcatggccacccgcacagacactggcctcacccccaggggctgcccttggccctctgtccccatgccaaggggctccaggaggcctgagcagcccacccagactggggcagcagccctcatctgccatctgtcttctcccggagcctgagaggtccttgcagggcacattggagcatgaatgtccgctggaaaatgaacaagtgcttggggtaagttctagggggcagaggccagaggccagggctgggtgtgctgagcgctgcccgcccagccccagtcttgtcaagccaagagcaggcaatcccctgggggatgagggcctccatcccctcacatctgctcagctggcaggtgccgctggcagagggcaagccccttcccccacagccccagctcaggttacaaaaggaggcaaggccagctgaggacagggggaggggacaggaggggtggaggaggcctcacagcttcccagggtattgggggaggggagcttggatccctagatgggacttagagccagagagggaaggaccatgcccaaggtcacacagcctgccagtgggcaaagaggagccagcatctaggggcaggcagtgctgagttcaagggtaaccttgggtaaatcactgccctcatttgtaaaagcacagggcctgaaacctgcctgcttgccctcaaggcctcagggaaagctctgtaggctagagagcagcatatggaacctcctgattccctcacaccccagggacagaaagggagggactagaagaagtcttgcccccacccccaacacacacaagtcagtgtctctcagggatcagggcccaggacccccaccctacccagggcatagacagtcatctcctttcctttgccagagcgatgaacaacaataacagtatttgctcagatttcactggggactttacatttaactctcctcagatgtaattctcacagcaaagtttggacatgtcttatcatctcattttgcagaaggggaaactgaggcttggatgctcaaggctacacagggtgagtggcaaaactaggactgctcctccctgcttgcctcaagactcttacccgcactctgtcttacctctgagatcctcgacgcaccaaagggtgctgcctggcacttcaggcctgggatcttggggcctctactctttctcagattcatcttctatcctggatcgcagtatgaagtccacagtggcccctgagccagtctcttcccctgccccaaccctccataccatcctttctgcccatgtcatccctcatcccccacagcttggagtgccaacttcttggtgtggcattcaaggccactcactcaccagccagcccctgcttgcttctccagcctcaagtgctgctgggctctggctaacatagctagaccctgtgaggctcccaaagaatcctgactgagggtttaacttttttgcctcattctcttccctcacctacaaatacccacagcgaattatctgtccctccatcatgaccctgggtcatttttatcctcatcttatttccccagctggacctgcaggcattttgagggcacagagccagtccagttcctctgagcagcgctgcacagtgggtgcccagtgggtgtaggcctggattaaagtgagtggaggaagcagccatcagccccggggcctgcagatggagagggggccgatgtcagctccctccctctgggagctctgggttgcagaaagggagtcaggatcccagagccaacccccaggctggaagcctcagggccaaactccaagggaaatcagagagacaatgttgcgggtggaggccagcctgcactagcctggacagagcactgggttagggaggaatggcccatgggagtttcatctctgtcactgccagtgggatactatgagagcctactttgtgtctctcagcctcactttcctcatttgcaaactggggacagtagcggtaccagcttcacagtttgctatgaaaattaaatgggagcacgcctgtcacggcccatggtggctgcatctccagctggaagagttctgtgtgtggctgaagcaaaggtcagaagacagggctgagtgatgtggctcgagaggttgactggggccaggaggccaagacctggagtggctaaggccccagaactggtccctgtaagaacagcacacgtggtctcacctcccccaccagacagggagctagcagagagcagggactgcgactttccggttcctcacgggccagcgccaaagaggtctgccgaggattcacgccatgaccgttcccctccctcctgcagccaaacgctctgtggcggagcacaggagacacggagggcagaaggcgggtgaatggattctggggggtggggggtggtgggagtggtttcagtcccttgaagctgactgcatggggctcaactcctggaggacccagaaagagtgaggaagagaggtgtgggctcaatctgggcagcctgcttggaggagaaggtggtccaccctgggaacagaagacaggagggacaagcaggagtcaaggaagataccatcgaaggcatcagttcagaatctgacctgtcaccagacggacctgttaaaatacagatttcaaagctcacccgctgacagtctgataagagggtctgagacggggctgcagactgtactataaaagcttgtaggtgactcagatcaccagccagctctgccaacacctaaggacttaaggcaggattctcagaaagacacattgggtttcagaatcacctagtaggtaggtttttgttcaaactacccaagcacctgcctagtttctgaagggtgtccccagggatcagcccctgagagtcgacagcagtcttggcgagcagttgacaatggcagtggtctgggttggcaactccagtgtcaggtataaagatggcagtgtgagggcagtgtgggatcgatcagaggcagcaggggcaaacaggagagagggcggggcctggacacggccagcagagggcccaggggcccgatcagagcagtttgggcttggttggctcccaagggaactgagtagccctggagggttctggagtgagcatgagtgagccctggggcaggaggactcattgggatgtgggctgacactgcaccggcattgggagatggtgacacatggtagaaacagacaggtctgcatctgaacccaggctcagcctcgtttcagctgtgctgccttggcaagagacttgccttagaagagacttcgtcttttcctcaatttcctcagctgcaaaatggggctattatcacatacctggcaggacccagggaggatgaaatgggaagatttatgtgaagtgcccaactgactgcctagcacccgggagttaattctcttaattcttgttccccttcccacaagaggcacccctcttagagaccagaaaggtttctctgcaaagacggaggccctgggtggggggagggcccgctctnnnnnnnnnnnnnnnnnnnnnnnnnnnnnnnnnnnnnnnnnnnnnnnnnncctcccccacaagccacctggcccccctcccacctccacatatgggttggggggtggggagaggcagcaaacagccaaaccctcccaaacaggagttggtttccatggtaacgagggtaccaggaggaaggggggcgctccagatccagctgtcccccctgagcgccctacccgggccccagagcctctgctgatgcccacctaacaccctggacccccatctgcctgctctggggggacagctgggaccgccacgagcactcccttcactgtgctcagagtacgtctgccacctgggtaccgccaggggcagggtaggcagccccaagcaggagcccccagttcaagtccatccacactgctactcactgcgtccagccacgagaagccccatcagtactctgcgcccccaggcccaactacccatcatggctcttagaacgagagggtttatccagttacagctcccaaaagggccagagactgggtgagttaaggccctttggctatggatgagaacacagaggaccagaacaggagagagctttgctccagttcaacacactcgagatgacggtcctctacaggggctgtccccacccctcacccactcccaactccacagctccaacagaccctgaggggctgagctagggcacctggcacaatgctccagagagatgggccatggccagagagaaggaagaaaggcctaaccacccaaaggcctgtctagtgacagaatgggcagtgctggaggctgcaagctcccagcacctcggagtgtgtgagaaagggagtaatctaggaaggagccttgacagcaggtgatgggctccatgactccccaactctcctggagacggaagtcagacttggacgtgataggaggaggcaccaacgtgaacctgtttctcggggacacatccacaagatggtaggcaggccacaggctcagatagggaaggggtgctgaggagtcagctgcgaggtaagggagacagtggcggcggggcgggggcggggggcggggctctccctgctacagccataccctagaagccctcaccgaagccttcgactacacctgcactcctcacaagacacagaggggcttccaaagctctttggaccccatttagcggccaccaccagccaccactcaaaagataagagaaggtgggctgctagaaacaagcttgccccctttccaatccctccccaccccagccctaatggcacaggaggaaacacatgagtttggggtgtataagggggttcagttctcaggtctgccagttcttagggaggtgatcctaagacaagtcttctccacctgggaaagtgggatgctaataccagcctggaccggtgggcgcttgctccccagccctctgagcccttccccttctctggcagagcccctccactccactcagttctgaagctgggttctcagggcctgcagacaggggagccccaacccgcagaaagtgggggctggggggggcactgaactttcgaacctgcacacccccctccccgcgccgttcattaccttaacaggagttaaaaataaccgtctcatctctttaaattagtctgtctgcaattaccgcctggcacggcgctgcccgccatcgtcccgctggagcggcgccaggtggcaggcgggggccctcaccctgtctgtcagtctgtctgtctgcctccgggtccgcccctccttctcccctcagaggtgcagctaccccaggggcctcctggcggccctgcctctcgagctccccaagttgctggggaggggcggcccggggggccacgcacacggctggcagaactgagggggccttcgttgaacagaggactgggaggggatgggggcgggggcgggggggcgcggtagcgggggaggggcgccgggaggcccgggaagccggaagggcccgccgcgcgccagcgctcgtgggtgggtgtgagcaggtggccgtgggagtctgccgggcgtgccagcaactgtgccaggagcggctggcacgggctcgtgcccaggaggcgggcagctgccagccccccgctcgtgcagcgcggggggtgaggacaccccccaacccgggctcacaccgcctcctcccacacccccaccagccctcggggctggggatccccggaggacaaaggaggaggagggagccctgctggaacgggctgcggggaggagagaagggggagctctgcaagcaaaccactgctcagccgggctgtcgcaggaccctcctcctggcctcagggagcagcccctcccttctataccccaccccacctaggacctactggccagcctgggcgggatggggggtagggcaccacccctcctgatcccaccccacaacagccaagctgctccaggcactgagggagaagggaagtccccctccacggggctcctccccacccatcctggggacagcaatgggaggcacccaggtctggcctgaaagctcccaggggagctggcagccaggaaacacaaaagcaggcagaacaactccaggggtgctaagtggaaggagcaccaagatccagagtagcctggaaggcttcctggaggagtccagcactagggaaggaggggctagagtgtcagaggaagtgggagaccctacttggatggtaagggacagggaggcctggcacgctacagtccatgggggtagcaaagagtggacatgacttagcgactgaacaacaataacaacctggatgtgggacagccacacttccggaccctgtagagggagggagacttcctgtccaagccctcggccccggacctggagaccctatgccctgatggcaactcttccagcctctccggcaccaagcccagtctctcttcgggcttcagcctgctgggtgccttgcgcctgctgatgatcttgcctcctccaattcctctctgcaacacctctgaactgtcatcccacatccctggttgggccacagggcaaaagtcaagcccttcctgatctggcccactcggcctttcccatgacacagccctgccccctccaggagcccttagttccagcctggcacgcccaacagtctcccaaacccagcgtatgaattccacctccctgtctttgcatacacagtcannnnnnnnnnnnnnnnnnnnnnnnnnnnnnnnnnnnnnnnnnnnnnnnnnnnnnnnnnnnnnnnnnnnnnnnnnnnnnnnnnnnnnnnnnnnnnnnnnnnnnnnnnnnnnnnnnnnnnnnnnnnnnnnnnnnnnnnnnnnnnnnnnnnnnnnnnnnnnnnnnnnnnnnnnnnnnnnnnnnnnccttggaagtctttcccccaattctacccgccttccccacccagtgaagacagaccagactgccacccagtgaagacagaccagatagagtgccatattctctgggagggcttgcctggctccccaggggatctccctgctttcaccacacccctgtcccccagccctgtcccccccagtccccaccccccagcccttcctgcctgtaaaacgcagggcttgggtagccgtgatgcatcctgaaggtaggtccaatgcctcccccactggtccccccactctatctatcacagggttcagtacacggcaggggctgaagggcaacacttatgtgggggaggggagggaagaaggaacaatgggtccctggccccaaccctggcacctgaggtgtcccataggctctgtaaccagagggtggctgggagttgggaatggcccctccacccagcccctggagggactgactgggaatgggggaacaggtggtgggaggggcgggaatgagaggggaaagaggctccctggggagctggatgcaggtgggatagaaggaggacagccattgaggggatgagacgggaaaggccagaggtctttctgaacagccctcctccgctgctgcgggggtctctgccagggtctaggtgaggagcccaagcctgaggacccctcaccaatgccccagcccagggcaagccttcctgagcccaggcacagggagaagcagtgtgtccccagcagtgtggtgcagaggaacccgcatccaacgggcaggcgggaggcctgggccatcatccagggcctgccgctcactgatgacctaagaagagtcccattccctgccagggcctcagtctaacagtctgcaaaatgaactcatgggactatattatctccaagtaccttcccaatcccattctcagatttagatccatccctgtttgaaagttgccagtgtccccctgccacacccagggcaagcaggacactattccagaggctctgggtccctggagggagacacacagagattggaatccagctttcccatctactgactgtgaccttgggcagtttgcttctccactctgtgcctcagggcccagttctgtaagtagtgacagtaaaacccacctcaggcagtgcagagggcattaaaggtgacacctggcgcagatgcctaaagctgcctggcagagggcttggccctgagaccctcagtgcactgtagttttttcccaggttcaagcctcatgttccctcttgccatcttccccatcatccctaacccttcaactccaattggagctccgcctcctgcaggaagccctcctggcttgctctgactcacagtatcctccctggtctcagcaccctctgcactatccactcactcctttactcttttaccagacatgcactggtagctcctggtgccaggctctatgcttggtgccatgggcacagagattgatctaaccactgccactgttttccaaagagggtggggaagggaaatgagacaggacacaaaagactaagacttatgacaggtagggagaggacctgagctagcgaaaaggggttaggaaaggcttcctggaagaggtgtctgaactctgcccttgaggacaggaattatccacaaggagaagcggagggtgggacagtgcaggggagggaggtgggagcaaagcacaggacccacttaggaggaacaagtgttctgctgggggctgagcccagggggaccagctagaggatggagagaaagactcaggcctgctactccagcctgcgtccccaccccgtagtggccagagagacagaggagctgccagcataaaggctgagagccatgggctcccaggtcaactcccaggtcaacacagccaccgggcatctcgtgctgttcatgtccacaagcctcccctcctccactggcacacctccttcccctgacactgcctaccaccaccagccacagcccttgccctccatttaggcatgtctccctcatagagaccccctcttccacagggagcctgacagcttacaggccctaggcatggcctgaccacccctaccccccagcctcctctcctccaaaggcattgactatatccattccccaacaagttagccaggggaggatctggaggccacaatccagtcaagaccccgtcctctcccaagatggctcccccctttccagtggttggtactgaggcctccctggggtgcccctcccccttcccccacccccaaatgcatctgggctcagaaaatcagggaagtgggagacagacagcctggggtgggcacagacagatccccaggtctcaacaccctgccctcacaccagcaggggtcatcaccagcccaccatgctgatccaggcaagggggggacagcagctgccccatggagaactcagatcacctgaccagttccccaccttagactggctggtgccctagggtgaactcctggcactacagaaagaactgtgggcctagggtcgcattcctcaccctgaggccagcttcagggagggcagtgggaaagatttgggaggaaagcagccaccggcccggtcattatttcagctctttaaggagggtgccctggtggagagggtaaaacaagagtaacagaaagcaaactcgggaggtaacagaggggtccccagtgtctgaggcctgagaataggctcttctgctatgcccccaaggatggggtgagggtatccctcgggggtgcctcaaagtggcagtcccttgtcaccctaccagacctcccaccctgcatccagagcatgcacacagctgctcccagcacgcccccgcctgtctgccggccggccccacgccctgggcacacactctgtgacccctgggggtgccccagggtttccctccagaccaactaccgggtgcccagggacatctagcagcccttggaagccccagccaacggctctagcacccctcccagccggacgcccccaccttccagccggccgagctgttgctgtcgcctttatccttgaagtagggcacgtaacggaccatccagtcgtagatctgcgagagcgtgagccgcttgtccggggcgctctcgatggctttggtgatgaggtcggcgtaggacaggttcccccacgcgttccgccgagagctcttcgctttccgcagcggtccgacctccgcgcccagcggcggcgctggggccatcggcggggccgtggcccggcgctccggcccgcagtcctcggcgctctcggccacccccgaacccagcgctccgtcctcgtcgccgaccaagtcgggctgcggcaggggccaggtacacgagcgcggccggctctgcggcgcgaagtccgggtccacgtccacctgatgcgctcgcagcttcgcagccatggtcccgcccggcttgggcgaggaggggaggggggctccgcggagggtgggcgggcggctccgggatctgcgcgccccggggaggcccgcgggaggggtccctggcggcgccggctcaaccgcggggcgccatgggccaggtcgcggagacagggggctggacgcgctgaaaagcccgaagggaggaaaagaggggggcagtgagagagcggcggccccggagcccaacgggcacacacctcgccagccccgcttctagcacctgccgcctgcttgtgcctgcagccaccannnnnnnnnnnnnnnnnnnnnnnnnnnnnnnnnnnnnnnnnnnnnnnnnncctgcgggctggaggcggaggcgcggggctcccggccgggggcgaccccgccgcagcccctgcatgcaacagcgccgcctacggagcagggaagacaaggcaggcgcgaccccgccccctgctttgctctaggggagggggcgcgggggcggggcccgggcactctcattggtccgaagcagggctgtcccgcccacggactcggctggatccctcccctgagcgcgtcagcgggttattgttacaacccggggtttcccggggcaacagggatgaggcggggctcagagcacatggccccgccttctattcccgggaggaatgccccgccctctgtttctagacccttggtatttccaaatcttcgttccagaaacctggtggggtggatgatggagttcttctgttctttgtgccccgggctggggaaaaggagagggtcaagaacacctgggttctgggtcaggcttggccacaattttggcttctccatctgcaagttgtttttcgtaggcattcagagtgcctggtttaacgtgtagtagaatcaacctggagagcttgttgaaacgttttactgggccccagccagattactgggttgcggcttgagactttgcatttctgacaaggtcccaggtgatgcacccgggaccacactttgcaaaccactcttttagagtctgttgcaggctgttgccagggttgttggaacaaacacttgcctcaaatttcatcctgtttggggagaagtttctcgttcacttactatatttattgagcacctttgatgcatgtgcactgttccagctactaaggcgagagcagcaatggagacagatgaggtctctacagcataggctgtgaagaagtcaggtgttgtcagatcactgtatggcctcagtagtagagaggccagccgagcaattgggcagcccat

SEQ ID NO: 2 - DNA, 54567 bp, Bos taurus
  unsure (10433)..(10484): sequence unknown
  misc_feature (10434)..(10483): n is a, c, g, or t
  unsure (23417)..(23468): sequence unknown
  misc_feature (23418)..(23467): n is a, c, g, or t
  unsure (47035)..(47086): sequence unknown
  misc_feature (47036)..(47085): n is a, c, g, or t
atggatcctgaacaaagtgtcaagggcaccaagaaggctgagggaagtccccggaagcggctgaccaaaggagaggccattcagaccagtgtctcatctagcgccccgtatcctggcagcagcacagccgccactcaagagggccccctccaagagctactagccccgcagcccttcccaggcccctcgtcggttcttagggaaggctctcaggagaaaactggtcagccacagaagccccccaagaggtcctccatcgaagcctcagtccacatctcccagcttccgcagcaccctctgacaccagcattcatgtcgcctggcaaacccgagcatctcctggagggatccacatggcagctggtcgacccaatgagacctggaccctcaggctcttttgtgacccctgggctccatcctcaaagccagctcctctcttcccatgcttccatcattcctcccgaggacctgcccggcatccccaaagtctttgtgtcccgtccctcccaggtctccttgaagcccacggaagaggcacacaagaaggagaggaaaccacagaagcccggcaagtacatatgtcaatactgcagccgcccctgtgccaagcccagtgtgctccagaaacacatccgctcacacacaggcgagaggccctacccctgcggcccctgtggcttctccttcaagaccaagagtaacctctacaagcacaggaagtcccatgctcaccgtatcaaagccggcctggcctcgggaatgggtggcgagatgtatcccccagggctggagatggagaggatccctggggaagaatttgaggagcccaccgagggagaaagcacagattcggaagaggagacgggcaccacttccacacaccccacagagctctccccgaggcccaaacacccactcctgtccagcagtttatacagctccgggagccagggttccagccacgaacgctgttccttgtcccagtccagctcggccccgtcgctcgaggacccagctccctttgcggaaccctcatccgaacaccccctgagccataaacctgaagacacccacacgataaagcagaagctggccctccgcttgagcgagaggaagaaggtgatcgacgagcaggcgttcctgagcccgggcagcaaaggcagcaccgaatctgggtatttctcacgctctgagagcgctgaacagcaggtcagccccccaaacaccaacgccaggtcctatgccgagatcatcttcggcaagtgtgggaggatcgggcagcggactgccatgctgacggccacttccacccagcccctcctgcccctgtccaccgaagacaagcccagcctggtacctctgtccgtgccccggacgcaggtgattgagcatatcaccaaactcatcaccatcaatgaggccgtggtggacaccagcgagatagacagcgtgaagcccaggaggagctcactgtcgcggcggagcagcatggagtcacccaaatccagcctctaccgggagccactgtcctcccatagtgagaaagcgaagcccgaacaatcactgctgagcctccagcgcccgcccagcaccaccccccctgtgcctctgctgagaagccactcaatgccttctgccacctgcaccctcagtaccccccaccacaccttccgaggcagctactccttcgacgaccacgtcgccgactcggaagccctgagccgcagcagtcaactgtttacctcccacccccggatgctcaagcgccagccggccatcgaactgcctttgggcggagagtacagttctgaggaggcagggcccagcagcaaagacgcagcctccaagcctgcagatgaaccggaacccagggaaagcgacctcaccaaaaagaccaagaagggtttgaaaacgaaaggggtgatctatgaatgtaacatatgtggtgctcggtacaagaaaagggacaactatgaggcccataaaaagtactactgctcagagcttcagttggcaaagccagtcaccgtgggtgctcatgtatcttcggaggccgagaagagccaggccgagcatgagccctggtcccagatgatgcattacaaactggggaccaccttggaactcactccactgaggaaaaggaggaaagagaagagccttggggatgaggaggagccgcccagctttgagtccaccaagagtcagttcggcagccctgggccttcagaggctgctcggaaccttcccttggagtccagcaagtcaccagcagagccgaataagtcagtgccctccctggagggatccgcaggcttccagccaaggactcctaagccagggtccagttcagaatcagggaaggagaggagaaccacgtccaaagaaatttctgtcatccagcacaccagctcctttgagaaatctgactctctggagcagcccggcagtttggaaggggaagacaagtctgcggcccccttctcatcacccccgcctgccccgcacggacgctcggcccactccctgcagcccaggttggtccgccagcccaatattcaggttcccgaaatcctggtgaccgaggagcccgaccggccagatacagagccggagccaccccctaaggagccagagaagacagaggagttccagtggccccagcgcagccagacacttgcccagctcccagctgaaaagctgccacccaagaagaaaagactgcgcctggcagagatggcccagtcatcgggggagtccagctttgagtcctccgtgcctctgtctcgcagcccgagccaggagagcagtgtctcactgagtgggtccagccgctctgcctcctttgagagagatgaccacggaaaagccgaagccaccgggccttcatcagacacacgctccaaacccttgggcacccacatgctgaccgtccccagccaccacccgcatgcccgtgagatgcggaggtcagcctcagaacagagccccaacatctcccactccacccatatgaccgagacacgcagcaaatcctttgactatggcagcttgtccttgacaggcccttcagcaccaactccagcagctccagtggcctcagcagccccaccagagagaagaaaatgctttttggtgagacaggcttctctgaccaggcctcctgaaaccgagccagaagccacccccaagggaagacaggagagtgaggaaccaaaaccctcatccagtaaatctttggccaaaggcgcattgctcccagtttcctctgcagccacctcacacagcgggcacccaggaggcaagagccaggtgcaagacagaccagcgctgggggccactccgccctacacagaagcactgcaggtgttcccccaccccatcgctcagctcccgttgcaggagaaaccctacctgcccccgcctgtctcccttttctccttccagcacctcctacagcatgagccaggacagtcttcagagttcttccccacccaggccatgtccagcctgctctccacaccttactccatgccgccccttcctccctccttatttcaagctcccccacttcctctccaacctactgttctacacccgggccaactccacctcccccagctcatgcctcacccagccaacatcccattccgacaacccccttcatttctccccatgccttaccctgcctcctcagcactttcttctgggtttttcctgcctctgcaatcgcagttcacccttcagctccccagtgaagtggaaagccacgtgccccagatcaaaactagcctggccacactggcaacaggaacccctggcctctcccccagcacagagtacagcagtgacatccagctgcccactgtggctcccccatccagctgctcagcacccacatcagcccctccactggccctgcctgcctgtccagacaccatggtgtctctagttgtgcccgtccgcatccagaccaacatgccatcctatgggagtgccatgtacaccactctctcccagatcttggttacccaatcccaaggcagctcagcaactgtggctcttcccaagttcgaagagccctcatgcaaagggacgtctgtgtgtgggacagatgcgtatgaggtcgggcccagactggctggagtaagtgaagaacagagcagaggtttcccgactccattcttgagagtgcctgtgacattacctgaaagaaaaggcacttccctggcatcagaaagtgtcttgagcctggaggggagttcatcaacagtgggaggaagcaaacgtgtcctttcaccagctggcagccttgaacttaccatggaaacccagcagcaaaaaagggtgaaggaagaggaggcatctaaggtggatgaaaaatttgaacttgtaaaaccatgtagcgtggtgcttagcagcaccgaggatagcaagagatcggagaagtcctacttgggcagtcagggccagggcaggagggaactagaaacactctccagcctgtcctcagatccatctgacccaaaggaaattcctccccttcctcagccctcattgccccatgtgacaacctcaggatcagaggctttgaaggaatatgcccaaccatctggtaaacctcaccgaagaggattactcccatcaagtgtgaagaaagaagattccaaggaacaagctgacctccctccactggcacctcccagctcacaatctctgtcagaaacatcccccagaccagccaagttgcaagaaggtacggactcaaagaaggtactgcagttccccagcctccacacaaccactaatgtcagttggtgctatttaaactacattaagccaaatcacatccagcatgcagataggaggtcctctgtttacgctggttggtgcataagtttgtacaaccccaaccttccaggggtttccactaaagctgctttgtccctcctgaggtctaagcagaaggtgagcaaagagacatacaccatggccacagctccacatcctgagacaggaaggcttgtgccatccagctcccgcaagccccgcatgacagaggtgagttcagtcttgtttttcttctactccctgattgtaaaagcctttgctgagcttttaaagccacattctcctcaaggtccatttgcaaaacgagagccaactgagtggacagatttcctctctatcagctgtgactggccaccttatttattggatttctttgtcagtgtccctcaaatcattggactagatgcatttcaataaagtgaactttaaagtgacccactttcccattagcttctattgaaatatcaaagaaacaatcttatccaaaagactgagttcgtaaaccttgctgatgggaatgcctgcaacagtttgagaattttatgccactccaacatatatttcttccttacagtgttagtcttttcctgcttttcgtattctctgcatctactatttctgttctctggtgccacttgagattttctcagagagtctagagtttgacaaaaaagactcctgaaatattccttttttcttttatgtgagtagaagagcaaatagaccttaactgtagtatccctctttaccggtaggtgacagttccacagcttgactcatctttgctgatggtagtgcacaacgctggcaatgctcatgttttctcctccattgcctctgacctgaggctgcattaggaggcatgaaatcttgatctctgcaagttcaggaagattgacatttgataattccaagtttgtttcggactggtgacacctccatatcctggtgtcaccttgtcaggtgacaagggcagcgtaaggattcaagtcatgatgtgctatgctgacttgatatttgtggaataacagttggtcttattggttgagtagcctcactgtgccaggcattgttctgggcacttgaatccagttgatgttcatcactgcctgtgaggtagcagtaccatttccattctgtagatgaggaaactgagagtcagaaggtgagaggtccagagcacatggcaactatttggcaaacccagaatttggaccaagacctgtctgactccagagagtctattttcttctttcaattattcaaggaaagaagactgtaaaagtgactgcaaatttaaagatcttcattagtaagtctttagaacagatcctttgaccaaataaatccccctaaactaaatcctgattgcagataaatgaacaaactatgttcattaacttctgcatttgcatcctcttttactgagtgatgcttgtgcattgaatttctccttagctcgcctggatattctgcaccaaactgtttcccaaatttattctctaaatatccttgtcagtctactgctgctgctgctgctgctgctaagtcgcttcagttgtgtctgactctgtgcgaccccatagacagcagcccaacaggttcccccgtccctgggattctccaggcaagaatactggagtgggttgccatttccttctccaatgcatgaaagtgaaaagtgaaagtgaagttgctcagttgtgtccgactcttagcaaccccatggactgcagcctaccaggctcctccgtcggtgggactttccaggcaagaacactggagtgggttgtcattgccttctccgttgtcagtctacagacatccttaaatgagatttccactattgttatacacatcacgactgattttctctccagtgtctcttactggttgtggctactcctgagatgctgtggtaattatagtcatactgagaacttattgtgcacctattatgtaccaagtactatgcccaacatgacttttttcctcacaaccacattgataggtttctatatcatgatttgatggataaagagaccaaagcataaagaagtcaggtaacttgcacaaggtcccaaacatagtaaatggcctggattcaaaactagatctcactctaaagttcttttggatgatctgaactgcccctctgtttcaatgactgaacactgaaaggtggtttaagaaaaacaaagaattaatttggcttaactgggtttgacaacaagttgtttaaaatgctgctttcctaaaatgagctgcaactttttcctggaatatctcatttggttcacttggatcagctgataaagaatccgcctgcaatgcaggaaacctgggttcaatccctgggttgggaagatcccctggagaagggaatggcaacccactccagtattctggcctggagaattccatggacggtatagtccatggggtcgcaaagagtcagacacgactgaagactttcacttaaacacttaaacttagcgtgtttcctaccagaagctcaccagtctgatacattactgtaactgcatagcccactgcttgatgcctttctacaatcatccctctctctggtctctgcttgcattccagtgataggttgctcaccaccccttagtacaacccaacccatctttgggcagtgctttaagaaagttccctattatattgacctgacatttgtcatcccatagcttccattaactgttagtagctctgaaaaggccctttgggtgatatcaggatttcaaagctcttcctaaccatctttatacaggaatagaccacccagtcaggtttgagtttggtcacatacattttttttttttttcatatgtaaaccatggggaaacccaagcttatacaagagttcactttgcagccacatttcgttccccaagtttctccttcctttttcctccttggcaataattttgacaaccgcatgcactattgcaaagagattaagaacaagggcttcagtgccagattgcccaaatttgagttccccgatctcacttactaattgactttggatcagttacttaacctctctgtgccttggtttcctcattggtaagacagagataaaaagctgtaagatagaaaatacgtagctcataggaatgtggagataattatatgagttaaaatatgcaaggtgtgattagaacagtggttggcacactgacacttgataatcactatcttcagttactcacattattatctttaaaacttaaagtgtatccctggtcccctgctcgagtccaaccatgtttcctggtagagtgtctgctgccaccaacaccagcctcctccagcttggctctgacatcacagctatcagcctgagggaggcctcttggtcattccatggatggcccagatggtaggctgacatggaagtgaaaacagcatgctctgaaaacctttgagtattgcataaaatcatcgatcttttgctgaagcggcacaccataccttctcttggtttccactccccatctccaattcagaagagattgtcagtgagtcactgaatcactaaagctgatcctggaatgaatctttaagatggtctaatcttgactctgagcctcagagaggtgaattaatccacccaaggttggctcagtttgcagtggcctatgtgatgcaagaactcagattccttgatttccaatcagctacttttctgttcagccccttgtaggagcaggtgtggtggctgaagcagggatttctgtccttagattgtcgcagcaccaggggacacagttgctgctcctactggctataaacagggcagttcctcctgaccttaatgaaatggcatgaagcaggatgagaatatcactgccagcctcagcccccagcccagcatcactgctctctattaaaggtgcacccatccctgccaccatcagaggatctaggggacaggttatccacccagctcttaacaccaaggcctatagctcatgaagagaatgggttccctaaaatgcccacccccccagacacatgcccatcagtgggcagcacagcctctctgtgtccagctctggcagcagtcgggggtggggtcagggccttcaggagacctgctttatgctcctagaaatgcccttgacttgctgtgtggctttgacttcctgatgtataaaggagaattgggccagttaatcttcaaaggtgaagtcttcatttctgtatgcagcattcctctcacacaccttctctgaggttggcatgacccaggagaccaagatgaggacctgtccccagaagcccctagactagtgtgaaaaaagagaagaaacacagctctcgtgggaaggcctggtcttccctagagaaaggcctgggcagagtcctggttctgacttcacctctggggattcatttcccttcttctgtaaagtggggcaggtagcatcttgtctccgggtagagggagaatgaatgaagtgagccatggtgaagcgtgggcatcattccatgacggcgtgttaaccagcagtgattttgttgttcctgcggtgggccaggttcgcctcccttcgctggtttccccggaaggacagaaagagatagctagagtggagaaagaagaggagaagagagggaagccggaggaggacgctcccgcctccaagagaggggagccggcgaggatcaaaatcttcgaaggagggtaagaattatgtttggtttgcagtgtctgctctccacgcagtaagcgctcgtgcccgcccgcaggctgggggtggtgcctgccttctgtgttcagaacggtgatctgtgttcagaggtggtgagcatctcatctggcaaggctgtgtccacaggagccctgggctttccaccttccaggaagtgccatctttgtgggacttgctggccacctctgttaaggaacattggctccttggtgggggctgggggacaccaggtatatgctgggcactggaacagtctgggtcttcccccagcccctcttgcctcagatgctggctgggttcctagaccccacattggggttgatagtgaccctcccgggtcctatgcggactgccgtctacgttggtacatgttctgcagaagtcacctctgtcctgcctaagcagccacagtgacaggtctgaggtcccatgggctctgccaactgggatgcttacagggctgatggtgcactgcactcatcagctgtacatactggtctctgggtctcttcctggactggcctgatccaggacttgttgatttgtaaacatttagaggaacgcccctggtttttcaccttcggtgctttgtgtttgtcaacctaatgactgaaacagctcagaattctcagctgtggggctctcggggctcccagaaggctgcctgcttccaggcctgctctgtggaagtgtcatgcgagctgtgttctgtgtgaccacgtgcgtgctccctgggatgtgggtgtctgtacgcaggtcccgtggtgtctgtctcagggtcctgtgtctgtgtccccagtgtaatcaatgcagccctcttcctacccagtcctgagggatnnnnnnnnnnnnnnnnnnnnnnnnnnnnnnnnnnnnnnnnnnnnnnnnnnctccagcacttgcaagtgcccagttcacaagatcaaagtgggaggtgccaggttcctctggagcactgggagaggagacagtgcccagctcccgaggccactggtgggcatccttcggcactgaccaacagggtctcccaggagaaggggtgtttgaaaactgaacttggggacttgtgttgtcacagcaatagggaggggagtcagggatggcaagcatccttcagtggcaaggacacgtccccaaaggggagaaatatcttgcccagagttcccgtaacttctccattgagaaacactagaccagcgggttttcgaaacactgtctttccacctggggactggcgggtttcctcttctgctacttggttagagcgcccccgtgtgtctctgtgttcgcacatcatcggatcctccaaaggccatgtaacatttcaccccaggattggtggatcaggcacagccttctccctgcagcttcaaggaccatctgtggggtcccaggggtggctgaatgtcagctggtgtgaacaaaggggtctgcctctgccttgagaggcaacagtccccagactggagatctggttccctgaggcagttcccttgttctgagccccgaaagggcagctggaaggagcctttccccagcccagttagttaacagctccagcccctcctagagtgagaggtgaaggccacgtctgggtcctcttctcctctttctgcagtctggccaggggtccccactctaacccacccccaccattccatccaggtcatcacttagtcccacccactctgttcagaatctccctgtcttgccaggtccagcatccctgccccagagtggctctcccactaacctgttccactgggacagtctcctcacctctccagctctgcctcccatcggtaaaaggggtaattacatacttggtgggttgttgggggatcttgtgctgccctatgtaaagaccagctcagttcatggtgctaacaaatgggtattggagtacttttttcatttttgtgtccattgttttgatcccctccaggataatctcactctgtcgactgtgaggaacatcaccctcactctctccacttgtcacatttaatttcagcactttggtagggggaacggtaatgccaccagtcaggtcatcttctcccacagtcccgctgtcccatctgggcccctactgtacctactgtacctcccaccttcgcttctggtgacccctcaatatttatggttctttgggggctggtgtcaccctccaggagagtttgcaaatgtggacttgaaagtttagggttgtcacagaacttccaagtgctctgtaccagaagatagccagagccaggagggtcaactgtgatcctgctctcatggaggctggctcaggggtagcagaaggcctggagctgaaatgtggggacccctgggcccagagtagccagagagggcttcctggaggaggtgggctgggcctggagggtatatgagacccggacaggcagagaggaaaggtgagtcagacggcagtctgggtgtcctggtgactcatgcacctggtcagtcggactcgtttcctgtggccttgaacggtctccctagtcagtgttgtccgcttccttggctaaacttcatccctgcaccaaggacatgaaatctgaatctccagctaggaccttactcctgaactgtagaccattgcttctgatgcctcatgggcacctctgcctggaagactagggcacctcaaacttagtatgtgctgaccaggctctacaggtaccaccaacagcatctccttccatcttgggaaccagatccttaggctcaaaacagctctgtctcatctccattaacaaatcctgtcaactcaccctgtgaaaccacatccagaagctgcccatttctcccacgtcccagctcaatcctctgctgagtttcatctggatcgtcacagtctcctgctagaatctcctgcttccattttacccactatcatgtactcttaacccagcagccggagcaatcccgtttaacatcagcagaccctgtcactcccactctgcacccttcacagacctccagtagcctgcgtgttctagccccagatcctccctgacctctgcctgcccctctaccccttgcttctcctttttcttttaaataggtcttttaaaaatttttatttatgtatttattgactgagcttggtcgtcacatgagctttcgctggttacagcaagcaggggccacgctctagttgcagtacgtaggcttctccctgtggcagcctcttttgttacggctcacgggctcgagagtgcaggttcagtagttgtggtgcataggcttagttgcctcacagcacgtggagtcttcccagaccagggactgaacctgtgtcccctgcattggcaggttcctaccccttgcttcctgtgctccagccaaggatctctttgtctgacatgttgctaccttagggcctgtgcacttgctgcacgctctgccttgaacacttttttcagagtcccacaggtccctcacttccttcagtcaccttcagagaagccttaccagatcaccctcctctctgtatcctcctccagcatttcttatccagcttcccttccctgctttatttttccccagtcactagtttacttctgtttccccctccagaacatacaccctgtgagaggtcaggaattgtgctttattcattgtcatatccccagtgctgaaaatggtgactggcatgtaggcagcgctggtgaatgtttattaactgaaggaatctccctttacctccctgaactcagcagcccttagaatccatgagcagtggagactctgggtctcaggaaggaggaaggacagagagtcagggccaacccaccaacctgacgtcagacttggcctgggaaggtgaagttgggtggcttcggctatggggcaagcaccctggggctgggagccaaggttgtttgcttgctgacctgccctgcaagtgttacaggtaaaaaacgaaacatgattccaaaaagggctggctcatgggttaccagcttcctggccagtgcctgctctgaatagatcctttctgtcctgggggccagagaggagtggtcctgggcacccaactctggagacaggccgctgtccttcctgggtgagtccaggctatcagggccgtgtcttctttctgactcagtgccttgatccctcttgaatgctcaggcttctccctggagtatagatgtgcagctttgagtgtggccccttgggccaggagcgagaggtcctgcttctgtcacatgttcccacactggctttagttctctttctatttctcccaaaccctgttgttccatctctcctagggaagacctgggcttttgtggacacagaggagggtgggatattgcaaagcacaggtgcgatattcaatggcccagaccagggagatggcagtggagatgggggtggagctagaggacatctggtgaatcgaatacaaagggtagggatgagaagcttggagtggagaatgactgccacgtttctggctcaagggtatatgaagctgccatttacggagatgggcagggatgggaaggagagtgagaaagaggtttggggaaggaggggtcaaagcttggtggacagtgttcagtttgaggtgccagtcagacatccaagtgttcaggaaggcgtgtggcaattggatatctgagcctggccttcagaggacaggaaaggtacatttgagatatgtgtagatattcacatttttcagtgcatagatgctatttaggaggatgcaactggatggtggatcacttggggaaatggaaagaaaagaatagggcatccaggatggggccgggatatgccagaggagaggtagagatgaagctgcaagagtctgagaaggaaaagccaaaagaatagaagagacctggcagaatgagaaatcctggaagacaagggcagagggagttcaaggtcagctgtgctgagggccatttaaaggccaaggacagggaggccaggcaagtgtccgtgggatatggccacatgggggtcactggtgaccttgatgggagctctttggggagatggagttctaaaggtggcgcatgtaaacctgtcccaagagtctggttatggagggaaggagggaatcacaaggaagtgaggagcaggacccggacatatgtgtgtgaggctgagcaggcgatatttacatggagagatcctccctaggcttgtgctgctaggaatgattgacagtaggggtgggtgggggagggcttggcagatgatgatgctgggagagaaggggctgagtgcaggcagagtcctagaggaggtgcaaggtgtggggccaagcactgatgagaagggggtgcttctcctagagtaatggtgcggggtgaggggagacagatgctgacgcactgcaggcagaactgatggtttggatgggggaagcggggagggttctctcagcccccatccagacctcttcttgccgttcctagatacctacattctcaacaacagatctgtgaatggctgttctgtttctaggaaaccacttagattcttgggaaagttattcctttgtaaagattatcctccaaatagatatctcagatgtaaagccatctagttaggtcgactctccatgctggcctagcatcattctactgaacactcagaggacttcatagggaacactcactccaggcattagacaaaactgattatgtcactatgaaacccagtaaacactgtgaaacgacagtaaaaaaaaagaaagaaaagaaaagacatattgatcaaggggcagactgagtgtctgagtctgctgggcccggagtccccagggtcttgaggatggtcagggaagacctaaatgcatcctattaaaatttaaaggagaatccatttctcaagcggatttggcctctggttgctatggggtctaaggcagcaagaggctcagctgagggggtggggctgggaagtggagtccccaccccagtgtgcgatggccgccggcagctgcaatgagcactgggcatcccctgggcctggaccgcatctgcctgagtctccacctgcctcctccctgtcctgggggatccccttctctcctgtgggggaagcggcctcttagcaaacagtggcacacactctccctctttctttcagtttttatttttttatttattttttaaaatgtatttttattcgtgtatttatttgcctgtgccaggtcttagttgtggcatgcgagagcttccgtcgtggcatatgaactcttagttgcgatatgtgggatctcgttccgtgaccagggatcgaacccagaccccctgcactgggagggctgagtcttagccactgtgtttattttatctaaattttacatgcacagagttgaaaaagccaaacatctctataaattttgttatggaagacgatagtacccttctttcccctacattttctgccctgccccacccccaccccagaagcaataactttcatctcttctagctgattatcttggttgaccttcgtatctgtgaataatgtgcctgggttgctactcttgggcttttcagctttaggtgctagctagtgactcacgagcctttccccagtccacacgtgacccctcatcccccatcctctcatcagagtcgtaccatttatgcttcacagctatcttatatgatacttttgctttcctatacaacttttattttctctaggaataaaagttgtatgtgtgttaacttcatcagttttctatatgctgtgctgtgcttagtcgctcagtcatgtccaactttttgcaaatcccatgggctgtagcctgccaggctcctctgttcattctccaggcaagaatactggagtgggttgccatgcctttctccaggggatcttcccaacctggggatcaaacccaggtctcctgcattgcaggcagattcttcaccagctgagctaccaggggagccccagttgtctatatatttattgttaattcaacccccagattctcacttcacaactctcccctgaagacgttcagatgcatcgggtcctctgtaaatcatcttgcagacacagtccctccctgagggatcctgtggactccaggccacacgggctgctccctcagcctggaacacagctgctaccccagggctccctcactctcaccctagagattctcttgcctcctatgcttgattgcctcatagccgtacatcttcccttttcctggtttacttcctcattttcacagagaccatccttcagcatggccttcttgagaaagggcctgtgagaggtgagctttttcgatgctttgcatgagtgaatggattgaagtgtttttattatgttcctcagtcgactcaagtgtctaattctgggttggaagtcattttcctttagagttttgaaagtgttgcttcctcctcctcaagcttctgggttgttctcaagaattccagatccatcctgattcttgttctatcctctgtgactgtctgagggtcttctcttcctgcttagagtggcgacttctcaagcgtgggtctcggtgtggagcagttttcatcactcgctgatgctttcaatctggcaagtcagggacttctgctttaggaaactttcctgaatggtttccttgaggattttctctcctctggttttctctctcctctctgtggtactcctgttattcatgcgctgagtaagtcctggctcgttcctctaatttctatgcctctctgccagaatccccatctcttcgtatttttgctctcctttctggggacctctactttatcttccaaccattcgtgttttccatttctgctatcacatttttaattttccttgcatgttcctcttatattaatagtatcctattctttttttattgagaatatctttatttatgtacttctgttagttaaaatattctctattttttaagttgagtgatttttttaaatttttattggagtataattgatttacggtgttgtgttcgtttctgctgtccagcaaagtgaatcagttatgcgtatacatatatccactcttttttagagtcttttcccatctagggctttacagagtatggagaagagttccctgtgctatacagtaggtccctactagtcatctattttatatatagtcgtgtgcatgtgtcagtcccaagattccaatttatccctcctcccttttgccaccctggtagcaataagtttgttttctacatctgtggccttatttctgtagtgtaaataagttcatttgtaccaagtatcctattcttatttgactgattccaggcctctcggaggctattaatgtcagttgttttgtctttagtgttcttttccccttgatttctgtttccttcaggttcccctcacccttggctttgtttagcctcttctctcaggtatctgataacctctggtgtcttcgcatgttaagagcgggaggctcaaagatgcctgggcacctgagtgtgagagcaaggcttccccgagactaggctgttctactgcggaggctgcagtggcagagtcttgtgtctttcttcttggatgaagactccagcctcccacctgaaggtggcagggttcatttcccataatctgagagccacagaaaggaaaaaggtgggacgcagagcgaagggggatctcagcctccagtgatgctttcactccatcccttcatttgtttgcaattccccatcctgccatcacctggcctgaaccccctcagaggccttccatctcaccctttgcagagaataaacctccaggctttttcaggagtgatctggctgctggagttgaggaaggtgaggtctgactgcttctaacaggactttccactagttgtccttatcttggtcctccccgtatgcacctccagagtccttgaggggccctgtggcataagtggagtttattctcatataacctgctgtcaacttagattccattctgttgggtctgcaaagtcttgttcagccatccgtctctttccagcttccaaaactgcattgccagtaccctctcctgctcttcccttctttgtgtgtttattatgccgagagagagaagcaaggggaaaggaaatataaatactgtttccccaccatctttaataacaggcgactagtagggttgatttttagaatgttttaggcacagaactcattcttccaaatagctcttctgagaaggtcaccctgcagccttccctataggtccttggagcccctgtggcacttccttgaacttctgggctcagaggagaacaggggaaggtgttggtgttccataaagtctgggaagtctttgggcattggcctgagacagaatgggattctaggcccacctctggcaattactggctagtccctaaagtaggttctttagtgagaactaaatggtaagattctatgggctctttactgtggcatataggaagtgcttagcaaagggttctctgccttccttgcttccttcccccttcactgttctttccttccttccatcttcctttcctcccacctccttccctctccagcatgaccatgatcttccccaggctccagtggcctttctccccaggcactagagagctgctgaaggtgttagccaggctctgtctctaacagctgtatgtgaacagtatatcaagaaggtgagagttggagactaatctgtggacaatgaaaatgaaatcaaaaaagagaaatgacacttgggttgggcaggtggaaagtttgactctgggttgagcatgggtccacctgaatttcattatctgcaaatcataggaaattttgccttttccatctttgggcgttgtttgaaatgaggcctccttgtcggagggagggaggtaagtggggtgggtcccagagctggagactttgggcaaatcatcttttctctctggactgcagtctctccctcagtaattggaggatatgggaaagggcttgggtcttggagtccgggactgggagctgcatcctgactctgcctttactggtgctgaggccttgagtaggcctttgctctttgtgaacctggctttctcatctgtagcatgaatggtcactgtgcggcttgggtgaaccatctctggctctcatgatgtgcggggtctttccagctcttgagctccagagctgtttcagctctgcactcagtacttgaggaagatgttgttcggagacagtttacagagaggggtctgagtgaagggcctatgcaggctgctgcaagtccttgtctctccctcagagaagctgccttctctaaaggtcaggaaatctaagccgagctcatctgcagggtgcccctgcctgagcaggagactttggcagtgtgccccagcctgagataagatatctgttgggaagaatttcctctcagagcccagagttgggtgttgtgtactgctttgcctggacatacacaggtgaggagatgaggggggcaatagacatatcaaatctctagaacttgccagaaaaatgaggagcttagaaaatttaagacagagttggaccagaatctcttggaggaggggtccctgctgtggtctgtcccccacaagcatcagctgctccttgctgcccacagtggggaaggcccagcctcgggataccctccagaggccacatcctgcctcctgtgcccacccacctgagtatcttcaatcatgctcttcagtgcctccctggaagtggagatacctctccatgccactgtgaatcttaaatagaatcagaccattaaatagagtcagctgtccagggtctggcccaacccctcccactgcactgccagacagaggggatgagtggcaccttgcagtcccaccccctgagcagagccctgcatctcagttgagcagaacatggggacgagagcataacttcggcatcagccagacctgggttcaaattctggttctgccactgattagaaaatcatataacatctctatggctcaggtttctcatctgaaaaatgggaataataatagcacctgttgagcaaagctgagaattgaaggaaatgatgtttgtatatcatgtgcccagcatatgctggacctcttaatctgccatgaatgatcggtacttacttacatgacggcctcttccactgaggagtcagcgggtgtctctctcttccgcaagcactctgtggtagagtgagcgctgaggccagaccacctgcgtgggaaccctggctctaacatggcaaccagctgatcataagtgagttaggtaattgctctgtgcctcagcttcctcatctacaggatgaggacaataatagcaattatgtctcaaagagtccatatgaggcttaactaagaagccacatgtaaagccttggcagtgcttgatgtgtagtaagtacttaatcaaagtccactgttatcattattttgaaagggtccctagaaatcatttgatccaaattcctcaccttgccaatgaggaaaccacagcccagggaggcattaacacagcatagcaataatagaagccagcctcttggccttcactcagaacacgccaacaggaagaagggaggaaggctgtgtggttgagtgtgtatgagggcacaggatctgtgccatctcgctgcggccttgctgatggcagggaggtggcattgtggtgaattaggctgggattctgacgcactttcagctcccatgaaaagagacgtttgactccagaggatcccttgtgttcaagagctaacagggtggcctggttggggagacacaccctagcggtttaaggagggcctccccccgccatggggtggaccctacatggagagttagagcccgaccagacagagaggcctgacgtggccttggatagaaggagcataccctggagaattcagggctgatggttcatggtgttggcaatttgcacttaaacagttccggaaaaaaagaatttttttagaactatactttcaacatgtttgtgattgtttaaaaataaaaacttaaaaaagagaacgaactagtttggctcagaagaaaggagaccagggaagccaggaattgaggaaagagtttaaaagggcagaggctgtcaggggctgccgggcagagctccgaacaagcagaatcagccaaggccaagaaagggagctaaaggcatcagatcagacaaagagccgggcctgaactccaagcagaatgttggatctgtgtggtggatgggcgtcctctgtcaccataggtggcttgcaggccaaagaaggacagcccagctggtgggagctgggtcccggggcacagcagccagagaaggcagcctgggctggagcctgggtaccaggcggcgggcgtgctgggcaggcctgttcccaggaacatggtgacagcagacaggacggacacaggaggcaaaacaaacctaaggcagccagggaggagccaggctgtgagcgaggccttatgccccactggcaatgcagctggcagactggggccaggaggcggccagccaggggccaggccgggcttctgggaactggagccaggagcagacagggcgcttccccggggaaggctgcgaggagtagggacagccagcagggcagagggcggagaggctggtccgccggctgtgctgttcagctgggaggcaggacctttaggggcctgggagggcagtgtgttcacccagtccagttgagcccaggctgattcagaaagaagaggagccaacccctagcagagaggaagaaaccagttcccatcaactttctaaacatcagcagatggagcagtcgggctgtctctcggaagcatctgagactgcttagctcgggagcttgggcccagaccctacaaaccacgatttttctgagctttgtcacctcccagcgtctgccctctgttggttctgatttcaccaacgagtggtgaacccttcccgtgaggagggcagctgaagacgcatgtcctcctctcagtggtcaggggtcgggaaggaggaggggaggggctgagaggaggtggtggttggatgggtctggacctggggaacagagtgtccctgaggatccagccataggctgagcggtgacccaggagctccagctgaggctgaaggagccagcatgctgtggattcatacaggctgggccgtccctcacctggactccagcagggtgcccgtgaggtcttgttgctgcaggaaaaggcccagcagtgacccacggatatccccatgctggtccaggctctttcccttcccccttctaggggccagagtacctttagtcagccagcccttacctgaggggagaggctattgtgaatgcagtggggcctcacctggggtctggcaggacagggcatccatcatgcttgctcaaatcctcaccaaagaatcctaccccttcaccctcttccttgggtctcctctgcccggtgtgccaggaagggccatcccagcgcagacaacacactgaaagcagccagctgggctcctcaggtgttggaccgtctccctagtacaaccttgagactcctggatggcgtcaagcactgggttcctgcaggaagtagtaaggaggaggttggggttccagcaggctgtgcacacaggcctggccatgcaccatagggacccctctctacaccccacctgctgggtgggcctgggtgccatccctttcctctcgaggaatcagggtgctttcacccacaccacgctgggaaggttgcttccatcctcccaagaatccttcatgtgtcttgtcccctccctggactcttgggcccttggctnnnnnnnnnnnnnnnnnnnnnnnnnnnnnnnnnnnnnnnnnnnnnnnnnnacccaggagccaccctggctctaccccagtgagctggctgatctgggacgaaccgttagcccacctgtgcagctgctccttttctagggggtgactggaatagggcggcctcttggggttgaggtgaggcttaaatgagaaagcctcgatcgcatcgccccagcggcatggaaccagtgtgtctagagacggagtctggctcgcctggaaggacgctggtcaggcaggacagaggcaggaatggtggcggcggggagggatcaggagtgtggcctctggggccgggtccttctgcatcactgctgggtgtgtgacctggcacagtggctcagcccctcagtgccccctttctcatctgccgtgtgggaagagctctgctgacacaaccaagggctgttctgaggaccaaacacataaacgtggcagcttggtgagtcccacagctccgctcctggcacctcctggccggctttgcacacgcagctgttgaccaggaggctgggcggtacgtgggaagcacctctcagggtgcagcagtgagctgaggatgaggggcaggtagcaaaggcagagggtggaggagggaagatttttccagatggacaaactggcccaaggctagaggcttgtggtgctggcgaggctggagagggacaggagttgcagtgagtgggagatgagtaagccatggaggggcctgtgatggggtcatggggtcacaggtgtcagtgggggcggggaaggacctctgtcgcttttccattaaatggaaaaggccatattattcatccctttttaaaaaatgggaaagcataaatgaaaaaataactataaattttatagacactccatgcactggggctatttttaaatcccctgttattcctataactccattagacaattggccggaaagcctggctcagaaagaaccctgactggctccccagtcccctccagagcaccccgtgtttgattaggccccagaccacttccctaggtgccccagtccaagcttccagacatcccaggcttctctgcctctgctctttatcttgatgttccctccacctggaggaacctctcctcttctttagctccatatccccacagtggactgtcctcagagctcgagtcaaatggccctgttccatggagtctcccagacctttccccaccctgctgctgcctgccatacattgcctcttcttccgcagccccccagacccattgtctcaccttatcttgacttgcattattttctgtttggttcagacaaatgcatgttccccctcatggccagccttagagcccacaggcaggggaaatccttttcataaaatgcacttacagttcacaactgtaaactttaaaatgtaggcagtgggctgatgagaatgatctttggcatgctgtggtgccactcactagctttgtggctgagggcaggtctttgtgagtctctgggctcagtttctccgtctctggagcacagacagccatctctgcctcccaggctgttgtgaagccagaaggctggaggacacgtgcggtacctgcctccaatctcagcaaacactgaggagagctgtgggaaaccttagcaggctctgttctcatccagccgctctgagctgattctacatctcatctgggtgtcgttctgatcacagggttgccttcttgccgacggttgctctggaaggcacttcacgtggtgtgaacggcagatgtaagtgatgttccagggccagtgtgctagagagctgtcctcaggcctccaggagaggctgtgcactgactcagttctctactggtgcagggaggtgtggactcattgggatggagcagccctttctgaggaggtcacacccagtcccgtcagcaccagccccactttggagacgggagtctctggccaacatggtcctggctctgctgtcaatgttagtcactcagccatgtccagctctttgccaccccatggactgagtctgccaggttcctctgttcgtgggatttcccaggcaagaatactggagtggattgccatttccttctctgggggattttccaaacccagagatcgaacctctgtctcctgagtctccagcttggcaggcagattctttatcactgagccacctgggaagccctctgctgttaatgcctgtgtgaatttgaggggggacctcaggcaacttactgatctctggtgaccactgattgaaatgcagcacatggccccctggactgagccctgtccactccaacagtcccctcgccatcctgtccttcccttgcacccgcctaccctcccatcaacctctcccaccctctctgcaataatagcagccgtggcctattgaaggcttgctgtgccccaggtacagaactcagcactaaacccttcacaaatataatttctaattccatcaccccttgatgaatagtgtgtgtgtatgtatatatatatatatatatatatttatacacacacacacacacatacaaccattctccagatgagggggttgaggcccagagaggcgaaggaacttgaccatggtcacttgggtagtgaggaacagagctacaattcaaattcaaacctctgtggctccagatcctgggttcttcccttcacagccccctgccactaactggggaccctgctttctgcatcttctgattctcagtcacctgcatggcaaatcccagttgaatcctgttcctgcccctccacgtgcccctggccaggccctgagtggaccccactgagtgtttgtggatagagatgatggtgatggtgatggtgctgctggtgcggtgctgccccagggcccgtggtgaaggatggaattggcagggggaggtatcctctcccctctcataaagaagactctttggaggctgtctcagaagctgtaatcttttgagacttgcatccccagggtgagcagtggaatgaacagaagtgaggacaccagctccaaaaggtgagggctgcgcggggccgaggagagtggaacatgaggaaggcctcaaggagatggcccattgtgtgcttggggtgtaactcccagtccttgaaaaatgtcttcagggaggttcagaagcgtctacttcccctttacattagatgattccaaaagagccatgtccctggtggccagcacctcatgttcgttctctgggtttgctttttcacgtccagtgcctgatcatggccaggttcaccgaactggaggcagatgagatctgacaagttttcatagacatggcatttctgaaggataacagagctagtggtggcaacagtctgaactaaatgtatgagctctggaagctttcagcagccacatctctcaccctgcctccctctatgcagtgcccgtcccttctatcatgctaagaactctccaacgcattcaaagcttttaaccaaagagaagatgagatgtgatcagccagcaggagctcaagctgtccagggaccattcctgcttgtggatgtgccgtgaccccagccccatcctccagtggtgaggaccctcatttggctgcagcttcggtcagtcatttaaggtgacaggttgttgaaaggctacctgtaaacgtaaagctcacatggtccagtctgccaggcctccagggaagccttgttttctggttttcaagtgcaaaaactcaaatctctttattcttaaattcagaatttcttctaaatctgttcaccatcttgcacctctatcatcctgatataaatctgacggtttggttaacttcactgaggcttttattgaccctgcattttctttattgggtcttgatctttcatcacattgatttccatttcacattgatttcaaaactgtctcacatggactgctagagtatgtggtacaaactccctgtctggcggatcatgtgttgtaggaggaacaaatgctgccttcagccatgtattcagtatccaagtatggatgctggaatgcttcatgttccgagtcagcaattccatcttcatcactggaatttggtcctcaccatcatcctcttgcctatggtcgcagagggcttccaagggcttcagcatcctcatcagcatgttctgaattcctttgtaaatttgcctgtggctggggtggaggaggggatgatggagcttcagccctaccgcttcctgtatgagctggtcagtatatgccggggatggacattccactggcatcttagccccaaaccatggcttcccctttgagttgggagggaaggacatctctatgcttcacagtctatcaaaattggggacatttgttttccttacgttattttaatcttttgtccgtaccacacagcatgtgagatcttagttttctgaccagaggtcgaacccaggcccccttcattgacagcacagagtcttaagcactgcaccaccagggaagtccctcctcatattgttgaaaattaaacctaactgtgatgagcgctctcaacgcagagcgctagacagcagatcagatacagattgatccctgctatatgctaagcacagttcaaagcacataacctagactaacaaagttaacctcacaataaccccgtgagtatacatgttactttcaataatttaaaaaactgaaacagaccatacacacaaatggagaaggcaatggcacccactccagtgctcctgcctggaaaatcccatggatggaggcgcctggtgggctgcagtccatggggtcacaaagagtcggacacgactgagagacttcactttcacttttcgctttcatgcactgaagaaggaaatggcaacccactccagtgttcttgcctggagaatcccagggacgggggagcctggtgggctgccgtctatggggtcgcacagagtcggacacgactgaagcgacttagcagcagcaaacacacaaaagcaatccaagtcataaaagtacagtctatgagttatgacaaaatgatgtataattttgtataattatacaaattatgtccagttacccccaagtcaagaaacagtacaggatcctcattttacagatgaagcaactgaggcacagagaggttaagtaacctgcccaggatcacacagctaagggttcagccaagaggtataataataaagccataccacagccacagcgagctgctctgagtcgtcagccccaaccctgccacggggcaggaacatgctcagggccacacagctggtggcaatgaggcaggatttgaaccccagcagtctgaccctaccaaccccccaacccatgcctaaccactgcactctgcagcatcccaaacaaagcaagtggatcccaacttcaccacactgtagctgtgcaacctcagacaggtcctttcaccctccgagccatgaccacatccttccttcctgttttctcaccttatccccctgcgggctgtttgaggctggaactccaggttggatactggccatttagattccaactaggcccacctcaaatccagcctctctaccataggaatctattttgctcaaaacctgacttttagtctgtgcttacactatccatgctggggggctcactaccacccaagcttgctttgctccaagtttgtagctctggggttggaatattctattttaaaatgaacccagtccttcctacctgtcttggttttgcctgtggactgaaccacctcccaggagactgcattaattgtacttgtgacccgaggaatttgtggacaaatttctatgagcctggtttctcctctactcccagctggtagagagcagatctgctcagaacaagagccaagaaggtgcctgccatcatgggacaactagaatggaactctcttctcttcccctgtaagatttgagtctgtaagtctggggcccaaatacacagcccccttgtgtgctctgcaggttgaagcagctggtaatgccagctggccccttcttgaaaaggggtctgatgcgttgcagtagctatcctgctgccttcaaatatttgggaaagccttgctgtcattcagttcagttcagttcagttcagtctctcagtcatgtccaactcttttcaaccccatgaatcacagcacaccaggcctccctgtccatcaccaactcctggagttcactcaaactcatgtccatcgagtcagtgatgccatccagccatctcatcctctgtcgaccccttctcctcctgcccccaatccctcccaacatcagagtcttttccaatgagtcaactcttcgtatgaggtagccaaagtattggagtttcagcctcagcatcagtccttccaaagaacacccaggacagatctccttcagcatggactggttggatctccttgcagtccaagggactctcaagagtcttctccaacaccacagttcaaaagcatcaattcttcggtgctcagctttcttcacagtccaactctcacatccatacatgagtactggaaaaaccatagctttgactagatggacctttgttggcaaagtaatgtctctgcttttgaatatactatctaggttggtcataactttccttccaaagagtaagtgtcttttaatttcatggctgcaatcagcatccgcagtgattttggagccccccaaaataaagtctgacatgtttccactgtttccccatctatttgccatgaagtgatgggaccagatgccatgatcttagttttctgaatgctgagctttaagccaactttttcactctcctctttcactttcatcaagaggctttttagttccttttcactttctgccataagggtagtgtcatctgtgtatctgaagttattgctatttctcctggcaatattgattccagcttgtgcttcttccagcccaatgtttctcatgatgtactgtgcatcatgggatgcagggtatacccttaaataagcagggtgacaatatacagccttgacatactccttttcctatttggaaccagtctgttgttccatgtccagttctaactgttgcttcctgacctgcatacaggtttctcaagatgcaggtcaggtgctctggtattcccatctctttcagaattttccacagtttattgtgatccacacagtcaaaggctttggcatagtcaataaagcagaaatagatgtttttctggaactctcttgctttttccatgatccagcagatgttggcaatttgctgtcattgcctcacagctattccccagcatagagacacctgacattcattgtgggaatctgatgtagttcacagccttttcttatttgcatcttgaggcatacgaatctctgagcattgaggaaaccctgaggttccccagagcatggtggcatggcgcctcatagccattggcctgtaggcattgatcaggcacccaatgtctacacatatttcatcagctgctatcacagatggccttggtcaggctcccctcaactcgcccttgcatgccagcctcagggggtgcttccagagcacggctgtaagagaacactgtcaccatcccctctgacacaggccaggcttctgtaccagcccctgaggtttgtctaagccagcttccatccctgcttcttgccatatagaattgccgtatagaatcatgccaaggcttgattataattcctataatacatgcctaacactccacaaatgctagctgtttctttttccctaacaaaaaaaaacacctctgatcctggctgacgttctttttgtgctttttagtaaagagtaaaacatgcgtccagtctccaggatctggtcacttccccattcttgacctgtttcctgtctggggaacaaggaagtgaagctgggagaaccagccaaccatagtcctgcatcaggctggactggctccagtcacaacagggggcctctgggtgctctgggccatcccatcttaagagggacaacctggaggggttgggaaggtctggggaggaatctggaatccatcttgagcacatctgtttgaggcctggagcagaggaatcttggctagagcagcatcctttagggaccctcatgtgcaagagggcttgcactgaactgtgctcagactacagaaggtcaactttagcttagttaaggggagctctgcccagagtggaaggtgctgcctgggacaccatgagaccccaggtgccagaggtggacgcgcccaaggaggggtgtggatgggctgccctaagaatgacctcatcagagggtgcacgaggcccctcccacccaggaagttgaaggtttttaggtccttcccagcatgaatgtgctttaacagtgattttcaaattgattttaaattcacagaactcttttttacaaatagattcctattctgaaaaacagctcaatgcaatgagggacatggggacccagaaccctgctgctcagcctccccttccataaatcctgagcacagcgtgaaaggccctgcaagtcagggcctgctaaaggctggggcacccccatgtaaatgggcacctttaagaagtgcaccccttgttggtagtttcacttctctgaacacaacaggcccagtttctggcatcctgcctccctccctaatgtcactgtctggtcggaaacagggccttggctgcattctttgggcctgagctggtttcagcccaggctgggtgcctgctcggtggttcttaggcttctgcactcagtcattcattgcacagtgtctcaagtcatcgtattgattcctttagaataaaagccacctcctctttttagacctgagtgctgtgtgtcagacccctgagctgctgtcttcagggcagctgatgctgtttactgttgtccccctagaatgacaaatcacaccagaaaaattgagaaaacagcccaaatggcacagatgcaagcctgcaaaatagacacgggctggcctccgtggtgggagtgcttctgaaaagtgtaaagcaggcttcttgacctgcctcccctcctgtctctgtcaggcagcctcgactcctggaatctgtgtcctctttcctctcgcccttgcctctgccccatcttgggctccatacaattacaccaccatcccccagcttccgggcctcccagcccactccatccccaaccctgcaccagatggggactcccaaaacaggagtctccccagtcagacccgattcacccccaaaagccacctaagacccacccgatcctccatggtactttgtgagttgtctgtgttacaggttctctgtctttattttaccatcttttaagtacctgttattcattctggagaccaaggtcagagtcttatttagctttgcttttctgggccaggctcagaccaggcctttgtaagtattattgagtaaatacacagaatactgcttaaaatagaccctgctctgtcaggctctgagcctaggcttgtattacacatgtgccaaggaattcttggcacagcaggtctgtccctggaccccgcattaaatgccccccacccctactggctcagtggtaaagaatccgcctgccaatacaggagaccctcaatcaatccctggagaaggaaatgacaacccactccagtgttcttgtctgggaaaccccatggacagaggagcctggcagttcatagtccatggggtcgcagaagagtcagacatgactaagcaactaaacaacaaccaccccagatgtagtgatgtgacatgatttctgcagaaccctgacaaaatgagagtccgtaatgtgccccgaacccggtgtgaacttgccccatgacccacagctcagcttccccagtatacttgtcaccaaagggtgtgttcccaacctcttggcaacagaatatttttagcagatacacaggtcagtgccacctggcacttgctcctctttccacagacatcccttcctttctgagcctcacccagagagcaacgagtcactgcaaatgagctggtgggctcactgtggccggacctccggggggccagtgaccgccgggaaccaaccctgagcctcacttcatgggacacaggctgcccgcaaacatgggtcttctcagaggaacagtgagcacatttctggtcgcatctccctctccttttgcatgatcatacccaggctgtgtgcccctgggggaaagcatatttggctacaagatcataatacaatcagaattttgacaagactttaaaatatccaaatctggaggagagttgagaatttttagaataaaatattaacaatatatgaaaacatcaataatatacattcagaacagcctcctcagagctcaaattaggaaggtcacaccaaggtcattgagtttatccccctcattcaagagaaaaatgaagcttggtggaaagagaagtcatgggtttaaaggtcaagacaggtatctactagccacatgaccttggggaatttactttgagccacaagtttagctctgagctaaatctgcctctcctattttgcttgcctgaaactgtttttttttaaagaggagatttttaagtcttaaaatttcatagcaacatgtgaccttagttcaaattctgattctgtgaacctgctgtctgtgacctcaggcaggttactgagcctctctgtgactccattttcttatgtatataggaggatgattaaattccctgtgtcacggggctaccttgtggtttaaatgaggaaaggtatgcaaagcatttaaaatagtgttcggtaccaagtaggagctatctaagggtatgctaatattattattattttaaatctggattggtggttttcttgaaaacccggaagatctgacagcctcatacaacacttggctggaaaggtgtagccactccccctttagagagactgtgccctgccttctagctctcaacctctccctcctccttgtacctcctctgtttcactcagcgggtgtggccagctcaccgctcctccccaacacgctccctcccttctagggccctgagccccctgtttggtcaggaagcagtatttctgtttattggataaatttagaggataaacagggcttccctggtggcttagacagtgacgaatctgcctgtaatgcatatgacccaggtttgatccctgggtcaggaagattccctggagtagggaatggcaacccagtccagtattcttgcccctctgtctctgagctgccataaccactcattctcttgctccagggcctcccggcctggcttctgggtgaacagcactagtggcaggccgctcactacctcacagggcagcttcactgctgagtcttcatcttatgcagggtccaagaacaacagctcacctaccaccttgcctgagatgccatttaatttccactgcatcccctcttctggaatccagagcagagggatatgccatctcctttcagagctgtgcgctgagttcccaagtgcttgggcaaaacttcaggtttcagaaatgcctacaaaaaggctggagtcactacccaaggggtcacgtgctgaatggtcagagtcaggcagctcagcatctccagtggcaggactggaggggaagctgctgaaggcagggggtcagactgcgtcatccgtaagagcactggggtcagagctgggttccggttcctgcttcaccactttcgagctgcctttgtggctttgggcaagacacacaacctctctatttctgtttccttctctgtcagatgaaaataataagactcccgtgatgaagggattgtgcaagattctccttcttttcctttgaatccgtgagtctcagagctgcagcataagaatgaaaacagacccagaagattctggcagctccactcccctcctgggagcctcactcccctcctgacccagggcagtggaacagggaagctgcttccaggcgagggttcgggacccctggtgctgagtagtgacctcaggccctcacagccctgggcctcaggcagtcaagctcaaggtctctctaagacatttcggaatccacagaaacagctttttttttttttttttaagacaaaaccaagcattttccagactggctgacatccctggctcgtcagagcagcaaaagacaggcaggtggtggggctcagacagccgtgagtcagctgtacccaggctaggcacagatagggggccgggagggcacttcctctgcggctgaagggctgcctcagctggagggtggaggggccagcagacctgggaagcaggaccatgcccctgggcgccgcaccatgcatttctggcttccttccctggctctttgcagggcatttctctgcagctgtcaacaccctcagtcccacccagcgctggcagcctttcaggagggctgcagaagagcagtgttcttctctgtctgcagtcctacaggcccctgggcaccccagagaaggaaggtgctaaggaaaccttggtcagcatcacctaaaagcatccaggcagcgtctgtgcaggggcagggggacaaagtggaaaagtcgctggtggtgtgatcttgtccacatcacttgaactccctgggccttggttcacatttgtataaaatgggaacagtggccaagagctggtgggagggctgaatgacctcaagcctgtggcagtgactggtacacctaagggcaaagtttgactgttttcgctggaagggaagtgatttttccaaggttgctcagcacgttcacacaggagccaggactcagatccagctctcatgctgacctctccatgcacagagaggttcctaccagaaagtggggagcgttctggcagccagtccaccgtggttgggagggactggctgtgtgccgcgtccgtggggagcccacagtgtcaggctgaacttgtgctcagggactcgtgagagcatcttggctgagggtctctagcagacatgaggaaagaaggccctggcttggctcccgtctgtccagcaatgcctaccgagcacttgcagggcatcaggcactgtgctaggcccgggggatgcaccagtggatgaggcagacgtgtcccccctccatggggctaacagggaccaccctgtgagaggccacgacagtacacacagctcgacaggtgccgtgaaggaggagtgggtgggacccccaggcccacgggtgtgtgagagagggctctgaaggaagggacccattggcagagccctgaaggagacagacagactgtagcccgcggtggctggcgggggtcgggggagggagtgcagggggaggtggaagaccagaggaaagggactcagaggcacgggatgacattcggtgtggttggcggagaagtgccgtgaagggaagagctggaggggtagctggaccaggaggtgccccggggccttcagcacccgctgagtgaggggcagggctttaccagagcgcagtgggaggagcatttgagtgggcccttgggctgtgaggagcggccagatgggcggtatttggggagagtcccctctggctgtcttgtgaagacagcagggtaggagagaggatggtctgccctgtggccgcccggaggtgggcctccctggaacacatgtcgcatgtggtgttgacgggccgtggtgatggactgaccgacaagactgaaggatgtggaggcaccaaggatgctggcctggccaccaccgggtgtgcatgccatttactgacgcggggacccaggaggcagtggtacaggtggggggcatggaaacaggattctgggaacgtgggttgcaaggtgcctgaagaccaccgggaagacgccaagagggcagctggatgtacagcagagcggtcagagctggagagacaagaggagtcttcagcatccagggggaaagtcaggtgtgtgtggaggagctcacctggaggcaggtgtgaggggagaagcatgcaggttggtacccgcagggagggtgggggtgcagagaaggaacttgccgaggagacccggtcaccaagccagcaggtatctccagatggtaggcaacggggctcacagggtaaaaccactgtcactcagatttagcagcccgtgacattgacaggaacagtcagcaggggagctgggctggggtggcgaggagacgtgactgccagcaggacggccctttccagacttgggctgagaagggaagcagatggagtggtcgctggagccagctgaggtctggcgggcgggggctgctgttgcttggtaccaagaggactgagcccgcgcgcacagtggtgggatgtgtccaaaggtggaggcctgaagctgcaggggaaggggtgggatcttatagggagacccctataaggggccatccaacctccagcacagactggagggactgagcctgggctgggaaggggaggagggcccagccgacaccggacagctgccccacacctgtccctggacttggtcctttgggaaccaccaagctgcacaaccccagtactggcctttgaggagcagagaagtcagaggctccaggctggccaaccagaactgccctctccaagtcctgggagcccaggggccacccttcccctgctctccatcacctgactgcctcctcctctcacctcttttctgtggctccccaatcacattctctcctggttccttatcaggatctctctgcttgggggtggcttttggcaccatccttctacccacccttacctttgggtgcttcctgggccctctcactatcctttttctgttttcatactctcttgagtagtcacctgcctcctcacaaagctgcaagtcccatcctgagtcccatggaattctggttgtgtgtggacattccttcaattctctcatgagcatctcacattcagtagttaaggactagactccggtaccatttctctctaagccgtggctggtaccacctgaactagctaagttgaaatctttgttcctcctgcctggtgccccctgtatcatccagacagccaccaggatttgtagattctacatccagaaggcttcgaatccctgtcgtacaacacgtgtgtcttgaacccagactgtttctcctcttgcagaccgttccccatggcaccaaggaagtatcttctgttgagactttatgtttacctttaagacaactttaaccaagtctccatggcattcaaggctgatggtgatccagtctgccctgcccacaaactctccaggcatcttaacactcatgcctgtgcggctggagtccctgcctggggtcctcccttcttgcctccatctctcagcatcctctctagcctctcccaacccaaggctgtgtcccagcaggctgtgcactttccatgcagtgtgacaaagtggtgtctggggttgtgtacctgccttctcaccccaccccccaagtcacagcaccaccctcgggggatcgagcagagtcctttctctgtgtacctgtgtgtctccacttgggcacccacctgtggtttaaactcgctattgagggagaatgaaggggctgagagtagccaaggtcgacggactgtctgcctgcctccgagctgtcttatgtacagagggaagcacacatgtggtagaaattggagcatctgtaggcctgggtgggaaggggtgaaagacaggggacccataggctccatcatggttggaagtgagaggggagaggctgtcatggaacctctgagcagggcagtgtggaagtggtgtggtgtgtgcgtgcatctgagcgtgagcgctggtgaacactgtgcctctgcctgcctgctccctccctcagagacccctcctgcaggcccatcctggtgacatcctctcagctgtgagctgatggtcccagtggaacaggactgagtcccagccgctgtcacttcctcaccttcccctactccaagtcccctccctgcctctctgaagccccacccagaggctgggtgggagggagatgtacaggtgagtgtgggcataggcaggcctcctgcttggcataggaggcacactctgcaggctgagaaagccacacctctcctaaggcgcctatgccctcggaccctgggtctcacagtcagaaagctcttctcctggaattatgccaggattccctccatgggccctgccgcagccttcccatccctgccaagacactcacacgcacatctacagtgttaggccaatgtggcgttctgacaaggacggtatcgagtgagcttgtgggactcatgggttccttctaagtggaaataagagcattctgattcacggccaagagcgcagtggccctgaggcccaagcaggcaggccaggcaccccaggaggcacccgcaagctgtcggtacttcctgctaggaccccaggtgatccccggagagagacctggtggctggaatctgggtcctgagagcttcccgctcggctcaagacggaaaatactggggagagagcttcaggccccgggtgtcttgactctgaggaccgggaaataaagtgccctccgctctcccgtcacgtgcgcgtctggcgggcctgcgagcggactgtttcggtgctggtcgcccctcgtgggggatggacaggctctggggcaggcagattcagaagttctgtccctttctagctgtgggagcctcgggctctccatggaggttgtgactgaatgtgggcaggtgtccggcagagggtgagcatggctcagtggtggctgccggagctgtggctgtcatctcttttagtctctttgttgcacggtggcccagagcggctgctctttggaagcagaagctggtgctgaggctggatctgggccagagaccctctgtgcccctgtggcttccctcccggcccggagcaccagggcctgttgcctctgagggagaggagggggtgcaccccccgcacccgtctgaggtcagggcaggtgcagagctccaggcggattccccacccctggctgtctctgctccgcgtccccctctccccccgcccctaagagctggatgtggccaggaagcgcgtgcatcttctgaggtgggaacctgcctcctctcctcctgttttgttcctttaccatgacgcctgttgctcataggtacaaatcaaacgaagagtatgtatatgtgcgaggccgcggccgagggaaatatgtttgtgaggagtgtggaattcgctgcaagaagcccagcatgctgaagaaacacatccgcacccacactgacgtccggccctatgtgtgcaagcactgtcactttgcttttaaaaccaaaggtaagagacggtcagcggagcgctggccctgcccgctgcagggagctcccctctgggagctccagcacagagcccgaggcctggacctctctgcctggggcctgagcagccctgatttccgggctccccagttacagagcagcccactgcagacggggcagtggcaccgtcggctgcccagcctgtcctcttagatctcacactggccccgtccaccctccacctatgcgattcccaccacggccaggcagtggcactccagcgcacagctcctggttttgtatttgatctcatcaccctgcttccttttgcatgtctccttagccctttatccaccgacctgatgagttccagcatccacactggtcactgccactcttgagtttggaaatccattccaccctgagccacttaacacacttgcatggtcacttctcatgccagactttgcctccacctcgcctcaccactcagactgtgttcccgctccacccagcttctccacagccctcagcactgggcccggctctcccctcaccttgactggcagccctgtcattctgccctggccacgcagcacctcagggtcagctcaggctctggcagtcacctgtgagaagaaggcagactggccagtgagggtatgaatccagagggctgtgttggatgatgagggcagccatggctgctgcagccacccaggacccaggcgtgaaccagtgaggctgagtctgcgaggcttggacagagtgtttctctatcctcccacgggctgctcctacagggcaggaaaggcatcgtgacccacttcttctttcctggtagccgagtagaccaaggtgcctcagagggaggcctgggctctcagtaaccctggtggcttcagcctcttgtgtttggcagattcctggctcaggatttgggcacgagggtcctgccttccccttcgggcaagttgggggcctccacaacagccccctccagggccacgtggcttttcagtggatgcaacttgagagcaggttcggctttggtgcccattagccttccttttgtgggtatagctgctcccagagagagaggctgggtggctttgaggaggcccctccggactttgagtcttccttcttcctcctcctgatcccttccattctgtcagtgctaggttgggggtcagtttatctcacccccttgctcacggccccctctctgactgggtgctcatctctgatctgctgaccccattagcctgtcctcctctgtcctcggcgccatcattcccaaatggaactcgaacttttccgccaaggttttggttcgaatacaggcgaccatcctccttccttgccctgaccctcttctttcttggtgtctcatcaacaacagtccagagggcccagagaggaccgactggcctgcagcccagccatgtgcaggacagctcgcctagcaggcctaggtcctagtcgtgggctccgtgccccacacacccccttcagccccacttcctctggccttagggggccagttgggactttctggaggagagaggtggagattcaacaattggatagccattgaccaacaattcagataatggtctttgactctgaatgccaaaagctgtttgtccaagccccaccatgaagggaaagaaaatgagtccccccgcccctgcccaagccagaaatgactgttaaagctggagctgtaactatcagctaggacccctgcctctggggcataacccccaccaccttcctctcttccccttgtctggacggactggcaaaatcaggtggcctccagagtggatcactgctggcccaactcccaggctgtccagcggaccacaccattctgttctcagcgtgacgagcccagtcctgagagtgccccctccaccgcacccccacccccacccagcccagggccacacagagctgcctaccatctcggggagccatcatcctctatgtgagactggaaagatccattgagccaagtccccagccagagcagtctcccagagcaatctctattcaattctctctggctttattgagagcaaaggcctggtctttttctgccaagtctgaaagaggtctgggtccctggcaagaacaccccttttccaggagattcctgcattggaagccacatagctgagctatctgcagtcccttcctgggtccccctgagccctggagggtccagagcacacaacctgcatggaatgtcagtgggccctctgagtgcccagggggcggagcctgggatgaaacctgggggtggagccctgaaggccccgcccaggaggatttcctctcaccctgtgatggggcatgtgctgagctctctgccaaggctcctagacccttctgaaagacaaaaaccttccagagccagagcagtgagtgcatctgagatagtggaatctcaaactctgggaggtagaaaggggctagtatgggcggtgacagatggaagcagagccagctcactttggctctctctgcatgaggcaggagagtgagggaagccatgagacactgaagctcccttgactcctcagacccttcagccatcagcccagataccaaaggagctaccctcctctcagggctcctgcctccgtccagctgcctccgtctcctccctccccttgtccttgggctcagactcgccaggctgcatgagaaatgaagctgggcccggtggtcttcagggccctccgtcgccactacctggctgcaccggctagagagccttcctgtccgtctctgtccgcctgtctgtgtctccgtctctgtgtcagacgttgtgacagcagctccggtcctgggtgctagcaccggcttgtctcagtgagtgaggccggggaaggcccactgggatgtccctatggaggtctggggtcctgtgtcctcttctgagaaggttccccgaggccagcagaagggctgtggtgggtacaggcccttgcgccgatcgcctgcggacagagctggcagtttggagcagccctcaggggctgagggagggtggttggtcaaagcccaaagccgaatggggtagacacggttttcagcttatgctcttggtagaggatccacctgtgttccagatgcccatcatttccatccgcttgcctttcctccttcattccaggatggtcagatttggggtgagggggctgggatgatgtgaaaagctgtgaactctgcttggaaagctgaggctctgacccttgacaaggaaatggtgtccaggccaaaaaaagacacctgcagccatttggttcacctccttcaattcacagaggagcaggcaggcatacagaggggacactcagggagggtgctgggtaacactcagggctgcacatccgcccctatgtccccatggcctatcccagcagccactcagactcccagctcctccctgcagcctccggggcaggggcagaggagaagctggtgtccaggggctgcctggtgccctctcctgggattgctgagcccagacagactggtggaggcatttacatctcagccatcatctcagcatctctctctcctccacaaccagtgcgtggctgtggcagagtctcccgggtgctccatgaacactgactgttggggcaggggggacacacagaatgggaaggagggaggttccacgcagtggcatctgctctctgccaggcacgctctgctgccactctacatgcgtttgttcgtccgcttctcccagcatccccatgaggtaggtacaactttacagttgcagaaactggggctcaaaaggttaagacacttgcccaagaacacatagctagcaagcgacagagcccagactcagacccaaggccaccaagctcctacatgtcttggtctgtcccaccagtatggagcacgcaaggcacctgcagtcctgagacctggctccagacggggctctgcgctagctggcaacgtggctttggctgtttggttctccgtgatggtgaacaggagctgtcccagagcatcccgtcacctcagacagtggattatctcgtccagtggcatcattagcaccaaggccaggagtcagaacagaagcaggaagaccctgggcctggtagggggtgggtcacatggtctgggaggttcctcccgacactttacttctgtgatgagaagaacatttcccactcacggttattacgcgcccttagtgtgctcagcacctaacttggttgagtaagagacccaacccttccggacagaacagggccaacaataatgtcatagccaaaatgagcagtgtgcatagtcccctggggtctggggtattcaggggatggcaggctggtctcagaacctcaggggacgtttggtctctctggcctatgtaacactgcagctgccttgaccgccccctgacatcctgctcaggctttgcctactcacaacagtggggccagaggcccatgatgttggacagggacgttgggggtcccccagccctgggatgactctggaagttatggctgtgctccccatttggccaggagtagaagatccagttttctgtccagttaaaggaagaaaatctgagggagagatggagtcacagaccaggatgagcaggagggaaggggcaggaaacagctcctctccatcactgctgcccttgacctgcacacctcaggcagcctcagcttaaggctcctgttacctctgagcaaaaccttaaggttccttaaaattctcagaataattaagaaaaaccctttggttcatgcatgggtgctctctccctagtcacccacccatcctcccgttgatccatgtctcccatcctcgcatcctaagagcttgtcttcctctcgtcttcccatcttcccctctcgtctgcctctccgcctctctcctttgtcctcccaccatccacccttccatcctgcccgtcctttcatccccctctatgtctgccttccctattgggtgtgctgcctccatccccccatccaaccagccctctcccccttgcccagatctccttctctccctttctccatcttctcatctgtttagggatctactccccatctacccttctatttatttttatcctccatctgtctgtgcatctgcttatctgctcatcgagtatcccacccgtctgtctggattctccctcttcatcctgtttgtcactccatatttcctcttacccacttattcatccatccatctatctgtccaccaatcgttctatgcatctgttcctggaatcccttcttctcttttccatccatctgttcaaacctggtaataagatgagtgagacagagttcctgactcaagggccttgtgatgtattatatgaaggaccatggaaatatagccatccctagagcaacagtgagcacatcacagttggaggcgattggtgagcccaaaggaacatcgtgaggcatctggccagcatcctgaggcgagctggggctctcctgctggtccttcgcagagcgctcctgcccatagggctttgtgacctgtgaagcgctgtgcacacgtcaggaagaatcggtgtcacagagtttcccctgattccacagagcttctggctctgctcttcagcccactacggacagagtcagccaccccccgagggctttgtagtcacggggaggacggagcctttgctcagccttccctgtgcccaccacccttggccatgtctgcatggcagtgactttggaggcccaggaaggggacatgactctctaaggaagtcaggacttggaccccagccttgtggcccctaggtccctgtctagcagacttcgctatgccgtctgccctttctccatgtctattaatagcagtaactttgtcctggttcctcctcccaaaccctaagatccctccctgtgggctggcctagcagtatcctcagccagaaggacatcctcagcacccactcccatgctagttcatgggctgggtccctgctctcatcccagcatttgaaatggtcagtaatcctgtcaccagctcctgggcccagggttaaatcagaaaaacttttgcatatgacttgtcttttaatctccttttgtttttttaaccagcatctcacttcctcattataccctctgtccgctcacagcccctcacccaccctacccggctcctctgtacatcgtgcacggcggccgtggctgcacccctgacctgagcacgcgggcagagtgatgtcnnnnnnnnnnnnnnnnnnnnnnnnnnnnnnnnnnnnnnnnnnnnnnnnnntccctcctccccctcccccctgcccaccttcccctccctcccctggcccccttgcccgccctccccctcctttctgtcctccttgcctctgctccccctccccttctccttcctcaccctcttcctcaccctcttctccagtcttcccaaatacaaagagacaaaggctaagttcacggaacgatggcacccacgcccctccttcttacagcacgcgcctggagccagagcacttgagcattgctgactgtcacgcaggtagagcacccggcacccggtgggtgctcagtgaatgtatggtggttacattaatacacgagtattatagtcaacatcgattgagcatccacctgtcaggcatactctagacacgtgccgtggttatcttggcaaaccctcacaatgacgcagtgaggtacatacttttatatgctccacacccacactcacacctccacactctggacatgggcttggtgctcaggtcttttagagctaggggctttcaagagacccaaagccaggcagacctgacagccccctatcacctctcaatcccaccccacgtcccagcaccacaccccagcctcagtcccccagtagcaagagtagagccatattagggccagtttctgtgaacacaaggcagagtggaaggtgagtccaagtcagcatgtctggccgggccctgtcgggcctcagcatccaagaaggaggccagagcagctcttgggggtagataagcaaccagagatattcttctgcagtgagcaaacctttggccagatcccctaaaatcagggtcaagagagtgtgaaaaagcgaggtgtgtgttcctgtgtcttgtttctttctgtttatctgatttgggaatgtatgtgcagtcttaaaaacaagttagatcatatttccttttaggtgaaatgaatcagctttattgaacagaatacactgaactcagagctgtggcctccaaaatgagaatgtggggttactgagttgatcaagaaagcacgtcaagccatttacagatgtcttattaagtcctcataactgtggtagaaactggtgtcactcctttttaaactgaagacatttattaaagctcaaacaggttatggaagttgtctgaggtcaggcaaaaaccactccatgtggctccatgccactccagtgcctggggggctggacaggggagctgcacccaagcccagagccctgcctgggtgggaggcagggtgtgttcactagcaccgcaccaggggtccactgggcaagttcagcttcattttcccagtgaggccgaaaatgatgaccagatgaccttgtttgagaatgcctgaaatcagtgcagtcgttctagaaataattcctgccagcaccagccctattctaagtcctactctaggtactagaggttcttcaatgcatgaaatatagttcctgtcctcaggaagcctgcattctagaggggagccgggtagtgaacaaatgtggaatagggcaagggccttgagtatgaaataaagcatccatgacaggtagggaagtgtggggagtggcctctctgtttaggtgatgtgagccgcgaacatgaggcagggggtcaggaagccacgtggagcctggggaagggctctctctgcaggtggaacagcgggtgcagagcccctgaggacaagagttgggaagtcagagacagctgcggctgtgaaggtcaagggatgggtttagccgcctgctggagcgactgccctgactctgtacgcagaggatggccggtagggggcgcggctggaggcagtgatgcaggctgagcacgtgttggactggggggggcggagggaggtgaagaaacgtgctgttaggttttgctgacacatcagggcgggggcaggtggagggtgaacgcatgagaataaaagatccaaggatggtttccgaggtttatggcctaggaaactggaaggatggagttgccatttcccgtgatgatgaagattcagggaggagcttgtctgttagacgcgaagtggttgggaggtggccaggccggcgccgcagccccgcccctgagggtgaggaggttgagcaccagcgccaccgtgtggccagacctccccagcgccccggcgcgcttcgttccacccgtcccttggctccagagaggcgggactttgtggagattgacagtgaggggtattaggaattattgatcggcaggggcctcccgtagagctctgcaagagcccagatgtggggggcctggcgaaccttgtgctgggcacgggaatcttggattccgtcactcctgagttgggtgcctagggcagggcaccagccctctgtccctcagcgtcttcatctgttacagactttaggatctttcctgccgaatatcaggagccgctgatcctgactccctgactggtagcactacccctctgaccttcaactgcagcatgagatgctggccgtgctgcctgtgtgttgaggttgtggggtacttggggtgagaagagctgaggtttattgggtacttactaggtgtcagaccctcacaatcctctcagcagcttcatgaggtggcttttattattcttacccccacccccaccattttacagacaaggaaactgaacccagagagaaaaagtaaattattcgacattgcacagtaaggaaggggtgggactgagattcaaacccagaccatttcctgcttctcagtgcataaaaacatttttaaactggcagtgtaatgatgtaggggttataaaccttagtcctgactcagccattactttctgggtgaccttggggaaacatttgcctgctctgggcatgggtttccccacaggttgatgagaggtgaggctaggtgaactcctggagctaaagtcttagggcaaagctttagggtatgttttgcctccccctcacgacccctgctctgtggtccccagccccttccgcctctctggtcattctgctcccagctgccaggaggtcatgcccttggcctcccttcacctgacagctccaccccgcagttttttatctacatcctcttgcatgcccgactgtcatccatttgctgagtgctgagctgtttgaaagcacaaatgctgggctttctggtcccggtgcagcttggcatagtggggtccagagaagcatggttgtaccagtgacctgagtcagctcatgtgtccagctctcttagttagtagttgagtggatgctgacatgagcgtagtgttgggccagcaggacccaaaccctcaggatcctgccaggtgggcgagatgttagcggagctctccccagagtcctgattgctgccaacttcagagatgcccaaactaggtctgtgtcctgttagagctgaccccgctggtggggctgccccagcagaagtcagaccaggaggctggtatttcagagctctactctcctccccagctgggagcaccaggggttctacaagcaccttctctggacatgagtggctgggaagaggccctctccgcaggctgaggtcagcttagccaaaccttccaagggaacagggcctgccacctgccagatgctattgtgccaggcatcagcagcgtggccacagtggcaggtgtgtatgtgaactgaccgtgcccagtgctgctggccccgccagcatggctgctgtattccagaataatagatgtctccatgaatgcgctgagtggctacagttattaatatttgagcccttgatatgtgccaggcttgtgtttcctcctcctagcaaaccttatgagatgagactgtcatattcatttgacaaagatggagacagaggcccagcagagtgacttaacttgctcttggtgaagccaggactgaatactaaccaaaaagaaaaagaaagggaaggcctgtcttgtttgctgtggtttgatgccagccttactacttactttgcctgggcaaggtaaggtgaactgtctcatcttagttccctgtctgtaacatgaagataggaatagtgcctaccgggcaggattatttgtggattaggtgaattaacgcacatgcaggccctagagctgaaccttaacatggtagatacgaagtcatttttgctgtttacaaagtgctcccataccctcaacgatcttggccgtcaggcggggtttgtggcacagagcagcgtggggtgcggctgtaacctcgggcctcctgtgtctgtccctcaggaaccagtgatgacccattccaggactcggaagggcgagagggcgcagaggccgtggcagagcaccagttttcagacctggacgactcggactcggactcggacctggacgaagacgaggatgaggacgaggaggagagccaggacgagccatcaggcccgtcctcggaggcgcccccacctggcccgccagccacgctgcccgcagactcctcacccgttcagggccctcagcccacagaggccacccggggcagctcggtctcagaagccgagcgctcggcacccagcagctgctccacatccagccaaagcatcctgtgcctcccccggctggcaccggccccccggggcccagtggagaaggacacaggctcggccctgagctcccaggccctgtccccaaggaggccgtggtccccaagcaaagaagcaggcagccacctaccactcaccccaaaacactcactaaccaaaagctactcgtctccccagcgacattcaccggcccgagagccactggcctcagccccgagtccgcctggctcccagacgggccctctcccctgcgggtccccgagactcgagctgtcgcctcttgccctccaccccctgggaagggaactgccacttcgagcgcgcctgccccccgaacgcaagggcgctgcagacccaggcccccccagacactcgcccaccaggagatggtctccaggccaggccgagtcaccaccacggtcagcgctgccagggaagtgggccttggcagggccgggcagccccttggcggccgagcgtggcccaggctcagggctggccccccgggctctctacccgcccgcgcctctacctcacaagcttctcggcagaagcccagcggagacctgcacctccacatgggtgagttcctgtcccccaagtggctgatgggtggggggccgcgagctcacacctccctgagcgtcacacccagagctggacccctgccagttcagcggttaccaataaggcgtgcattgggcaccacttacacaggcactgtgctgggtgcctgaaaccagtcagctgtgtgtcagaagcagcggagcatggactgtggagctggactaaaagaaagtgaaagtggaagtgttagttgcacagtcatgtccaactctatggactgtagccggccagactcctctgtccatggaattcttcaggcaaaaatactgaaatgggttgccatgcccttctccagaggatcttcccatccctgggatcgaatccaggtcttcagcatcacaggcagattctttaccatctgagccaccagggactacctgatagtttttaaattctggactacccagaattaaatccgggttctgtcacttacgagccgtgtggctttagatgtggtataaacactcatgccatctcctcccaccccatttccacgtattctttgagcagatggcagagcccaacccaaatctccacatctccaacatgactgccaccagcaccctccgagtcacttgagccagctccttcccatcttcccatcagcaccgtcactgtcacatcatcagtgccatctgccatcagtacactccagccaccccataggcttgatcaccgtggtcacaacatcactgccaccaccacggtcacgatccccagcactgacacgttatcatcatcggcttacttttcctctcccaacaccttttctgtcactggagtgtcacgacccaacatctctgctcaccgccagcagtgtcagcaccatcactcaagcgattcaagctccaggagtagtaccatccaggaatcttaacttggtttttaatttggggctcaagttaaaattcctggtggtgaaaaagtgaaagtcgctcagttgtatccgactctttgtgactccatggactgtgtagaattctccaggccagaatactggagtgggtagcctttcccttcaggggatcttcccgacccagggatcgaacccaggtctcccgcattgcaggcggattcttggtggtgggaggaggttaagagcctggggtgggaactcatgttcaagggtaaagttgggtcagtattgtctgaggaacaagagaggcagcagaagcaagagagagggccagcgcacagaagccaacagaaggggcagctccattctctgaaaacgaacgcgctggccagaagcgtggggaccttggttcctgagtgtgcctatggccactatagggctggagatggcccattccagagagggcacccacccagggtgccaccgttggcaagggttgggactcaatggtggcccagctcagctaggacctgctctgtgatctcgccaagccccctcctcactctagtcctcagggtctccaggtgcccagcaggtaaccctcgccttcctctgtcttcttttctgaccctagcagaaggccgagtcgccaagtccgtcctgttcacctgctcccgctcatcctctcttctcccgacccttctcggccccccatgacttccacggccacagcccggcccggacggagaacatcttcagccacctgcctctgcactcccagcgcttgacccgcgccccgtgccccctgattcccatcggcggaatccagatggtgcaggcccggccgggggcccaccctatcctgctccccgggcccagcgcggcctgggtcagcggtttctcggggggcggaagcgacctgacagggtcccgggaggcccaggagcgaggccgctggagccccaccgagagctcgtcagcctccgtgtcccccgtggccaaggtctccaaattcacactctcctcggagctggaggccagggactaccccacggagagggggaggacgagagggggcctgggcagacctcccgactgggagccccgtgcggcccaagtgcccacagagcccacgccgacgcacagcccccgcacccccccagagacctcaccccgggcacccccaggccaccgggcagagtcccggagcccccacctggagtcaccgcgggtgccggccaaccctgcggcctccgccaccccgccgctggaccgcagcagttccgtgggctgcctggccgagaccgctgctcgcttcccagcccggaggaggaacctctctggggaacccaggaccagtcagggctccccccagccctcgggaagtggggggtccgggacacctccacaccagcccgaggagcgggggccccggagcacttag

SEQ ID NO: 3 - DNA, 5925 bp, Bos taurus
aatgagctgtcgctcagcttggcagcaggacgctggcagcaggcacactccgcactccagcccagcctgagcgtgcctcaccactgtggtcgccatgcccaccgccttgtgctccatcgctctagccctgctcgtggccctgcacgaaggtgagcaccccccacgggctcagcagctgcagcagccccgaggctgcttgtctgtatctcctgctggggctctgtgccccccaagccagccgggggccttcaggggcaggagttaggtggcttgggggctgcaggaggctgtgctattagaggtgctgccgtcccaggacagccaccggtccttccaacccagagctgctggggcttccccaggctggcccagggctcctgagcactgagaatgccaacttcctcgattatgcaagaggaggagcccagcgggtcccccatcccagctgtgccaggcgccctgacccacctctccacttttctctccctcctgtgcatgcaggcaagagccaggctgctaccacccccatcccagagcaaccagcgcccttgccccgggcccgaggctcccacctgcggactcgacgttgctcctgcagctcctggctcgacaaggagtgcgtctacttttgccacctggacattatctgggtgaacactcccgggtgagctactggagggatccaagaggggttgcagggggcaggggtggggaatgctggcatgctggggaagccctggcacactgcagctctctcttggagtgtggggctaacaacaatagcaatcagctattgcttcagttctcacgtgggggctgcctgagcaagacagagggctgtctcatgaaaatcctcacaaaaagcctggtcagaaagtgttggctccattttccagatcagggtactgaggctcagagaagttaggtgccttttccaaggtcacacaggaagagtaagtggtaggtaggaggctccagcctaggtctgcagatgccagagcgcacagcggctctgccatgctgcctctgtataatcttccaagaatgatatgattaatgacagcacccatgtcttgactgcgccaggccctatgccaagcactgctggtgcgttatcacctcgtgaacgcacccccatcctccccagtgaagcggggactgctgctgtccccaaatgacagacaagagacctgccccatgtcacctggcagagccggggtggggtcccagagctgtctgttctgtctgcacccgcgctgcctccgggccactgcatacttcaagttgaagtttctctgtgtgtttgtattttttttttccttctccaaattgcaaaagacaagagaagcccggcacgtaagcgtgtgtggagctaatccgcatccaaacactggctcagggcgggaaccctgccagtccctgcgtgctgggtctacctggagtctctgcagctccaaccacaccgtctaaaattagctcaggcatccgaggtgctggtctgaccggccacggggccctgcccttcgcctggcccgtctcagccagacggaatctgaaatcgatctcagccaatctaatatatctatgcacacacacgcacacgtgcaggtcaggcacacgcaccattttaaagtcaaaactctaagaaacacttgggtcacccttccaggcaagtggtgaccggatggaggcagctgagctgtgagcctgagtgttcacttctgtgagagggcactctctccctttcttccagactagttgggggtcttctttgagaacagggggaccagcctgactccatcagttcaaattgctgtctgggagtgagaggggcagggaggacagcttccacccctcccccccatgctgagcgtcttactgagcaggaccagggcagttgggagggaacagaggcccgagagggtaagggtcttgcccgaggctccctggcatgtaaggaggaagctgcagtgggaattcttgagggcaggagctggttacttttgctgccaccctggtggcatggatggctatcccagtgtgcagtgtggacagtcccagcttgccaatggtcctggtttatctaatcctctctctgtctctctccaccctacaccactaccttgctggcggcccgcccacagacagacagctccttacggcctgggaaacccgccaagacgccggcgccgctctctgccaagacgctgtgagtgctacagtgccagggaccccgcctgtgccaccttctgccatcaaaggccctggtaagtgggcacccagcctgcaaggggccagaggtgactgctggcctggacctgctctggagggcagggtgtctggaaggccagcagtggcggactgttagtccctaggtcgtgcccgactgtttgtgaccccacggactgtagcctgccaggctcctctgtctatgggattctccaggcaagaataccggagtgaattgccattcccttctccagggtgtccaggaggccagcagaggcgtggctaaatggtggaggaggggccaggggagcagggtcctgggggtccagaggctgccctgggctgtggggcagcctcccttcctgcagggagccagtcacccttgagtcttcccccctgccactacccccagctctgggggcttctgagaccattgcgtccccactcctgggcaggaggaatcctccccaggtgatagctgaggcagcacaggtccagagaggaaacaggacttgtcctgtcaggctacacagccagttagacgagagctgggccttccgccttagtcgctggggctctgggacctctggaactttctcagtggagaagcagtagctggagttggggggccatggcaccgtccccgagctgccacaaagcgcctttgccagtcttttggccctctggacctccctccctccacgcggagcgttgggaaagcagacagtgacttcaccctcccctacctcccgctctcatgaaggcctatgggaaactcctcccctgagacctcagctgtggctgcagccctgcctcagtttccctgctgagggttctgcttggctgcaagtggccagactctgggaaggccagccaccccactgcctctttctgaggctgagaacgcattcccagtggctcagttttcctcaggccccaccccacctgggaaaagaagggtgccaggtgcacagggtggaaatggatctgctcctgagggcgggtcggggcggggggctgggctgggcctgcagccaggcagcctgggggccctggacagcccctcacttgggccctaatgctgttcactcaggactgatgcggtggcagtcccaggcagcgggtcccctgcagctgcgttccaggatggcaagacacaggccacagcaggagagctcctccagcggctgaggtgaggggcccctacactgattgagtgccttctgtatgccttgcacatttcccttattctccatatgacgccttgggtccttatggggcagccaatagcagctcagacagatgaaggtgtttacccaaggtcacagagcaagctacagcatctggctgactcaatagcctgtgttcttaaccactatgctctttgttaccgccaggcctggaagtggacttttattgagggtttcaaggcttgtgactgtggaaggttcccaggtgttcattcaggctgtgtctgaatcaagcatctcccacatgctggggtccaaacggatgctacccagcctgttccctccctgggtcccagactggactgtctccctggtagctacaacatggctcagctcaaggcttggcatccaggaggtgcccatgaacgtgtgtccaaccaaactgacttgagaacagaaacctatagccagtcatgtggcagggtggctgaaggggcagcatctgagctagaaagtcccagccctgccacgagcaagctttgtgaccttggtctgctcactgaacttctctgtgcttctggttcctgtctgtgaggcagggacaccgctgctatccatctcacgggcttgttgaagtttagagcagttgacatacatgaagagccccaagaaagcccaggccctacgggagctctgaaggttttagccatcccgaacctctgtccctgagggttcctcagggctgcccagggccggggtgcagcctagcccctcaagggtccacatctctgtgaggaggcggaaacataggcaaaaagacaggatggccggctaggcaggacccaggatatactgaggaactatcttaaaaaaataataataaaatgaaagtgttagtcactcagtcgtgtctgactctttgcaaccccatggactatagctcaccagactcctctgtccatggaattctccaggcaagaatactggagtgggtagccattcctttctccagaaaatcttcccaacccagggatcaaacctgggtgccccgcattgcaggcagattctttatcatctgagccactagggaaacccaggaaatgtcttaagatgaaaaacttcaaggtaagactttgcaagtacttggcattccataattagcaaagagtgttttcgccagtctgtactcagcctcacaccagttcaggcctgtgtttattttacagaccaagaagggggttcagagaggttgagacccttgcccaagttcccaaagctgggaaccagcctcccagttcccaggctagaacgccttaagccagagtgaggccacctagatgacggcagagcccctaccagggtctcagccagattcaaaggactgctaggatccatacatatctggagctggaccttgaagaatgggaattttagggcacggagtatggggtgagtggaaggtcaacagcctgaagagccacagggatagaggtgtggaagtgagagggcaatcaggggagagccacggggctactcttggccgtgcagtcaccctggtggcacttgatgttgagcatcaattttgtcaaagctccttgtgggcagaaaagcttctaacctgccccggcctctccttgaggttcagaccttgttttcagggttggctgtgaccaccctctgacctcttggccatgaataaggaatccagaccctatgaccgctgcctctcatggggaactctcaagtgatgtatatctccagagatgctcaattgacctctttccatttcagggttatttctgcaaccaagatccactttgctaggcaacagcagaagccgacgagggagaccagacctacacactccaggcagaggaagagatagctctcgactctgggagaactttgggaaggaagcctgtgtggatacaggaggagaggggcatcccagagctgggagaccttccgacctgtttcctgggccagaaaacccagctgctggagcaggcacaagctctggcctcctcgccctggggagggggcctcgctcaaggcagctccgtgacaccaggaaagtcatcaggccccaggctgcagcgtggcctcccacactggctccagttcctaggccctgctgaaaggaacggcatgcggaatgtgctagcctggaggtgtcctgtctggcggctgtgaaccaggaacaacgtgcagtggcgggcactcacacccaagccagcccgagtccttccagggttgaagtcccggccgcccccgacccctcacccccgctctgtcccctccagccctcgctctccagtgtccttattctcccttcataccctcggggcactcttggtgagaagggcctgcaccacttcacctgtctgtatataacttatttgctctaagaaatttgacgattccgattatttattttaacgtatttttttagactctcaattatttacctgcgaacttgtgtttgtaataaacaacaaaataatgc

SEQ ID NO: 4 - DNA, 21469 bp, Bos taurus
  unsure (484)..(819): sequence is unknown
  misc_feature (485)..(820): n is a, c, g, or t
  unsure (13367)..(13416): sequence is unknown
  misc_feature (13368)..(13417): n is a, c, g, or t
  unsure (16577)..(16759): sequence is unknown
  misc_feature (16579)..(16760): n is a, c, g, or t
  unsure (20478)..(20529): sequence is unknown
  misc_feature (20480)..(20529): n is a, c, g, or t
tcagcctggcacccagctctggttggggggcggggctccggccaggccgggcggcggcggcggcagggccgagtcgaagttgaagtccatttcgtcgctgtccatgaagtcgttgaggatgatggactcgacgtcgcactcgaggctcccgctgaacatgtcgaggtccaggtcggccgggaagcggtcgggcgcggcacccagcggcccggcggcggcggcggcgtacggcccgggcagcgcgtctagcaggaggccgccggggggtcccccgaagacggccgcgtgtcccggcggcgccagacccgtcgcgcccgcctcgccgggcagcgtcataaggctgatggggtgggctaaggcactgcgcgagggcgccggcggcgcgtacggggccacccctttgccagggtaggtgccggcagcgcccgccagcgccagctccccgggtgcaccaagcacggggccggccctgggcgcgggtgggnnnnnnnnnnnnnnnnnnnnnnnnnnnnnnnnnnnnnnnnnnnnnnnnnnnnnnnnnnnnnnnnnnnnnnnnnnnnnnnnnnnnnnnnnnnnnnnnnnnnnnnnnnnnnnnnnnnnnnnnnnnnnnnnnnnnnnnnnnnnnnnnnnnnnnnnnnnnnnnnnnnnnnnnnnnnnnnnnnnnnnnnnnnnnnnnnnnnnnnnnnnnnnnnnnnnnnnnnnnnnnnnnnnnnnnnnnnnnnnnnnnnnnnnnnnnnnnnnnnnnnnnnnnnnnnnnnnnnnnnnnnnnnnnnnnnnnnnnnnnnnnnnnnnnnnnnnnnnnnnnnnnnnnnnnnnnnnnttttgcacgcggataaaccgggtgtgcagagacaggttgtgccggatggagttctgtggccagagacaaggacaggggtggaggagtgggcagtgaggggataaatgatgggaagaggagtgggagaaaatcgaggagaggaggagagaaggcgaaaagaaacgccaagaagcagaaggggaggaaagagggaagatgaaagggtacagcggggaagaagggggaacaggtgtaagtaccaggtaggacaaactcagaatatccatcccccaccccagaaccgccccaccctccctgttcgcagcccgcacaggcactgtctgtaggatggggccggagctttgggtctagtcttgccagggaggctactcttgaggagccgcctgcagcaggggagcaagacccctctccccaactcagccaagctctgcccggggctagccaggctgctagggccccccaacagattatgtaagggctcatgccgctgcggctcatttgtccgccccccccccccccagcctggcgtggcgccaggagcccgaaaacccagggctccagaaatcaatctcgcggtgactgattaagccctgtttagaactaattgctctttcgtgtgtggggagaataaattacctgctttaatttcgtgtctttaaaatgcaactgcaggtagagaagactgttaaccctttgctggaagggtctggccaggataagcagaatcggctgggtgtccccaaggtgggcagaggcccacattttctccccaattctcggagcttctgcgaactccactccgatcccaggacacccctcaaagcacatccatcagccgtggagacctcaaaccccacagctgctcagtacccaccttcaggtcagcccagttcctttccctccccacccacctgatgcaaagtagctttgccctcaagccccttcctgcacaaaatccccacaaagcaggtgacatcatgcccatttacagacaagaagactgaggctcagagagatgaagtggcttgccttaggccacaaagctctcctgctgtgtctggtccttcctcgggcttcaccttagccacacctacacatatcttcttgtaaatttctgttgggctccatatcactgcctacttttgccaggcctggcctggggacagagggaggcaggggagtccacagctccactgacctggctcctcacagagaacatggaggactagaactactgcagagcctaccacgccccacctctggggcctccctgctggaggcctggactccctggctctggcactgttgtggaaatagcaggggtttgggtatctgaagggctgggcaggatgcctggctcttttcagccacctagctatgtgaccatggctgttgactcaatctctaggagtgcatacctcagtgagctgctctgaaaaaaatgggcaacatacagtaaccacctcggaaagctgttagatcattacctgagataatgtgcatgctaagtgtttggtgttcataaatgttggtcaaatccctcactctggccagaagacctcacttcttagatcactccacagacttactccttctctacaattcttaatatcaggccctgagtgtacctgcgctgggcacaaacaactctggggagctggcattaccccatctcctgtaccagggaatggaggcccagaggcatgatgtaacttgcccacggtcccacaggcaccactccaggtctgcccagcatacggacctgctctcatccccccagccccagaacctctgatccgtccaggctctccctgctgcctccttcccacctgactgcaggaggggtcctctctgctgcccagggcgcccacttgcccctcacccccagcaccaggcacgcacctgacttcttcagggccccaggctccttatctctggcactttctggtcttgggagacaacagctggggccccaaggcccctcccagcattgccctgcctggctcctcctggggccctgagaggaggggacccagacccccagggagtggtgctccctggagtagaaacccccctttcctgctcccgcccctgcacctggctccccagcccctccccaacacctgtgttcagggacctctgaggcctcagttctcaacccctgtgggactaactgcctagccagaggctccacctcgcagcccctccagctggaggtcagtcaggccacacctctttatccatgtcactatgtgccagcccggttctgagtgctggagggtgggaggagaaggaaggatgtcaccaagtagggcatctcctgagtacctgccgggtcagccctggtattgggagtattttatcccattctcagtactttatgatcattctgtcagtgttcatataactcagggactgtgacccctatctcaagatgttctagggaaatagcaacccactccagtattcctgcctggagaatcccacacacagaggagcctggcaggctacagtccatggggttgcagagttggacatgacttgatgactaaaccaccaaccatctcaaggtgaggtgactgagagagattacgtaagttgtcaagatcatacagttttaagtggcagagccaggcactgatttcaggttagactcactctgagtctaaaggacctcacattccaccatgggagagagaacaagtcagagaatttccaaagaatcttaggaaaccagtcctccatttcttctcaaactttccatgatgtaatcaaccctagaagctggtagcatgggaagctgggggcatgttaaaaggtcaaaattctctaagagtcttgcgtttcctttttagaattcaagggaatcttggcttgtattccacgagacttccaaattttctgaatatcaatacaaatgttttagatcaccgtcaagaacacacattccaggcctatgaaggtctctatccttccccactctgttccttgcccagccaggtacccctaagccccagcctgaaaccacagctggttggacccagagagaaaaaaggacttgccctgcatcacccaggacctggtggcagagctgggattcaagcccaggcctcctgacctgcagcttggtgctcctccctgtcctccagcaagcctgatctggggccactccctcttcctctctgggcctgtttccctccccagaaattgatgagatgggccatgcactctaggcacctttgcagttgacaacgaaaagttcttggaattgttcaggccaggggttttcaaacttttttaagtagtggaactcttgtagtaaatggaatctaacacaaaacatgagtgttccgcactcaagccactggggctggggtgggggtaacctggaaccttttctgctcagcaccctcccttggcactctcacagaaaatggcccttggcgaggaattctgcaggccacctggatggggttgacgcttagtaaggtgccattctttgcccaaggtcacccagggaggtggcccagagctaggtgaggacttaggccttggtctgctgagcagggctcttcaccaggtgtgcaccagggctgtgccccaggaggccaggccaggccctgcagctcattctggctcctcagggcccagccacctggtacccatcagagctcccggccaagatcctgtggcaagcactgatcacatctcacccacacaaggcctcctgggaggccagaggccacggaggaggtgagggagggggggcagggagacgcctctgccaggtagcagtaaccagggttccctctcagagttgcctagcaacccgccaccacagccaaggccccggcatgcccaggctcccctggtgcccaagctgggcttctggggcctcacacctcccacaccttcatgcaggcctggtgcagtttccaggatgggacctccctgacttggtgcctcagcgagactatcgggggtgggggcagagggaagggacagggggttacatcccagcccctcctactgtcctgcagaacctgggtgagaggccagcctgctggggcctcagtcaccagggcgaggaggctggtgcaggacaaagagcagggctctggtgttggatccagattccagtcgtggctctgacacccacaagcagttgagctgcatgctttgaacctccagttcctcaaacaggctacctgcctccacccttgtttcccttgagccttccaccaggcagcagccggagggatcctataaataacccagatcacggtccagtcctgcccagaacactcatatgcccccatctcactcagagtaaagaacaaaggccttaccatagcccaccagcccctctgtgacctcctaggctcctctcctgacactgtcctgcttgatccctcccattcttcaaaccttccaggaacctgccaggtaccatcccaccttgcccagatgcccatgtccatctctcagctcaacaaagtctctgttgagatgccacctgcgcaatgagacctatcctgtccgctcttaacagatgttcctctgccttgccgtttcttggctccctaaccctgctctgagtttttctaaaacaattagcactttctaaagtactgtataatttctttatattatgttcattaatttgttatctgggttcccttattttagaatccaagttccatgaagcatttctgtccctttctttttcttaccagaccccatgtgtttggtgtatgccaggcgtttcataaatgtttgttgagtgaatgaatgagagacagcaaaggagggtaacatagtcttgcagggagaattaatgagattggcagagtgacttgcacagaataggggctgctccaaactgagagaacacaggacagaatgggaggcaagcaggggtagagaaggcaggagcatcctgggccacagaaggaagcacagagaggaggaagggcttcggtgagagggaaagtagggctcccagggtgaacaaggcagctgcccaccctggccccctacctgctcgctcctgctgcccgaacagatctgggtaacccagggcttgctgcggccaaggtctctagcagcctggaccatctgagccagaagatgctccaggagcccccaggggaacagaataacctcgtccttgctgatggtgcctcccccatggacagggtctgagctgtttggtggcggcagctcatccatccaacgggacaccctcatctattcccaggacacccttcgcccacgagcagtaatgcattcatctgacaacacaaccccatttatccagcacaccagtcccatttatccagcaagtacaacctcatttgctaacagcactccattcacctgacgggccccctcatttatccagcaggacaccctcatttatcctccaagtcggaggctctccttcctcctgtggtgtggctgtgttctctgatggtgcaacccgcctgatccagcaggacgtcatctctcctacaagtacacttcatcccctgatactgcaacctcatttatctaataatgcagcctcaccttgcctccaagtaccacctcattccttgacagtacaacctcgtttatcttccagctcaacctcatttctcctcccagcacagcttcattccctgatagctcaacctcatccaatcttacttctccagccagagcccagcagatctcagggctggggagtgggggggaaagaggaggggtttggagcaagaagaagggtcccaccatttgctgtccctggcctatggagggctgcctggcactatgactatatccaatcttcccaggcccctggactttgagttctaggttgcatggtccagccagtgctccaccattgccccccacctcctgtttggtccccttgatggctaaagagaatccacaggatggatttttttttcccagctctccagcaaggaaaaaactccacctgattagatttgtagcatttgctggtttctgtggcatgaatattcccatcgtagccaattttaagctggcagcatgatgtcactgagcgcagaactgggaagaagttctccctgatcagctctcacgagccagtgcaagcccactctcacacaccactggcacacactcacataccaaggcgggagaagggcaccacctaccacgtgccagacctaagctaggttcttcagatacatttcttctgtgaattctaaaagccatccaaactgtggattcagttcagttcaggcactcagtcatgccgactctttgcaaccccatgaatcgcagcgcgccaggcctccctgtccatcaccaactcccggaattcactcagactcacatccatcgggtcggtgatgccatccagccatctcatcctgtcattcccttctcctcctgcccccaatccctcccagcatcagagtcctttccaatgagtcaactcttcgcatgaagtggccaaagtattggagtttcagctttagcatcattccttccaaataacacccaggactgagctcctttagaatggactggttggatctctttgcagtccaagggactctcaagagtctttctccaacaccactgtggataggtaatgctattttatgaagtgggggtggagaggggaactaaggctcaagtaggttaaatgactcctgagaccacaaagctgggaagtgatggagctaggtctgggtctcagggctcttgtattccaaagccaaggttcttctcactcacatccctaatgaggtggggaacgctgccctgctacccacctcagtggccatccctgccttgattctcaagcccaagcttcctggctttcatcagagacaggagacccaagtgttacgctgcccacccataacaagccctgtgctaccccctggcctctagtaccgaggggatcccaggactctcccagttcagtcccggatcttgtgtccatccatccaacctaaaaccaggtatggttgcctctccaggttccattgctgtccaaggttctgcctggccctgccctcaggaagctggccccacctacccaatggggatgtgacccagctcctccctttggtgcctcccagagcagagatcacctgtggggctgcatgagtgctctgattccctctgtgactcctgtttcctctctccttccttccttccctcccttcctgcatgaagaaatactgagggctagaattggaatcccagcctcatccatgtgaccttgagcatctcctgtaaaagacagtaactatcccaacatccatgggaaagggagtgaggccgggaagggcatgacatcccacatcttatgatcttatggagtccctatctcaggcccaggagcaacccttgtaccaccctaaatcccccacccacctctgacccaggaacacacctgactcagagagagtcacaaaaccgggggttgggggtggggaatctaggtaaggaggagggtcacttgctctgctgcttggagtactcagtccagacagacttcctgggagaaggagtgacctagatgacctcagggccctgaggccacatgcaaacccttggtactagggtctgcagggaaggaggggtggaagtgcaggcaggagcatcagagccacaggtgttgacaggtgaatggcttggagtcattagtggaacagaagtgggcagccaggggccaggaggaaccaaatagccaaagcaaggcaggaggtcaagagacaggccctggcatcccccacccctgccaccccagagacaacagagcccacacactcagcctggacagcaaacaagccaacagcagaagtcccagctcacccctactcaaagacccagggctcctcatcctccagactgacaatcaagggcctctgatgctctccagcctcgtcacctccattgcttacacccacctggaactccagccaccctggatatctcacatttcctgcctttgcacactgttccctgtgcccttctctctttctctgtgcacctgggtcctgctctatcaaggcgagctttgtggtgtctttcccctctgcaagcccccaaaataactattccctccccatttctactgaaaaaatctacctgtgcactagagtgtaattgtggatgagtctgcctcccaacttgaactttgtgggcaatccttggctcacggtaagtcaatacatagattggaacttcacggtaagtcaatacatagattggaactttcagcagccatgaaccactcaggcctggcaactttgccatttctgttccgccaaacctcaggctgaagttccaggtattggctcctcctcctcctggtttttcctccagttcctggtgcctctgccacctccctactctctgctgactcctccggagacttcaacaagtggagaaggaaagacactacgatttgctgagcattcacacacacgctggcactcaacagtttaagtcttactgagtatctgtaacaaacctctgagttagtttattattctgattttacagaggagaaactgaggcttcagggaacaattgacctgctccagggataagtgttgcggcaggaattcacaccagggtctgtgctcttccgcctaccctgagacacctctaggcgagcctaggccagacagaaactctcctggggaaagggtgccaggaactgccacgctggctcagcaacccctgcacagatctcctctctcttccaggattaaaggggatccccagttgccaagccattcaggcccctccgagcccctcctcattctgatcccctccctcactctgctggcagcacctcccacacccctgccccaggccttgggagcagctgcagtgacctcacccggccctgccctgagcccagctctggggagggcttagcagctgtgccccagccctgcaggcggctggggggcagggggtggaaaggaagagtgggcatggtgccaagagaaccatctgctctcccaggggcatggccacccgcacagacactggcctcacccccaggggctgcccttggccctctgtccccatgccaaggggctccaggaggcctgagcagcccacccagactggggcagcagccctcatctgccatctgtcttctcccggagcctgagaggtccttgcagggcacattggagcatgaatgtccgctggaaaatgaacaagtgcttggggtaagttctagggggcagaggccagaggccagggctgggtgtgctgagcgctgcccgcccagccccagtcttgtcaagccaagagcaggcaatcccctgggggatgagggcctccatcccctcacatctgctcagctggcaggtgccgctggcagagggcaagccccttcccccacagccccagctcaggttacaaaaggaggcaaggccagctgaggacagggggaggggacaggaggggtggaggaggcctcacagcttcccagggtattgggggaggggagcttggatccctagatgggacttagagccagagagggaaggaccatgcccaaggtcacacagcctgccagtgggcaaagaggagccagcatctaggggcaggcagtgctgagttcaagggtaaccttgggtaaatcactgccctcatttgtaaaagcacagggcctgaaacctgcctgcttgccctcaaggcctcagggaaagctctgtaggctagagagcagcatatggaacctcctgattccctcacaccccagggacagaaagggagggactagaagaagtcttgcccccacccccaacacacacaagtcagtgtctctcagggatcagggcccaggacccccaccctacccagggcatagacagtcatctcctttcctttgccagagcgatgaacaacaataacagtatttgctcagatttcactggggactttacatttaactctcctcagatgtaattctcacagcaaagtttggacatgtcttatcatctcattttgcagaaggggaaactgaggcttggatgctcaaggctacacagggtgagtggcaaaactaggactgctcctccctgcttgcctcaagactcttacccgcactctgtcttacctctgagatcctcgacgcaccaaagggtgctgcctggcacttcaggcctgggatcttggggcctctactctttctcagattcatcttctatcctggatcgcagtatgaagtccacagtggcccctgagccagtctcttcccctgccccaaccctccataccatcctttctgcccatgtcatccctcatcccccacagcttggagtgccaacttcttggtgtggcattcaaggccactcactcaccagccagcccctgcttgcttctccagcctcaagtgctgctgggctctggctaacatagctagaccctgtgaggctcccaaagaatcctgactgagggtttaacttttttgcctcattctcttccctcacctacaaatacccacagcgaattatctgtccctccatcatgaccctgggtcatttttatcctcatcttatttccccagctggacctgcaggcattttgagggcacagagccagtccagttcctctgagcagcgctgcacagtgggtgcccagtgggtgtaggcctggattaaagtgagtggaggaagcagccatcagccccggggcctgcagatggagagggggccgatgtcagctccctccctctgggagctctgggttgcagaaagggagtcaggatcccagagccaacccccaggctggaagcctcagggccaaactccaagggaaatcagagagacaatgttgcgggtggaggccagcctgcactagcctggacagagcactgggttagggaggaatggcccatgggagtttcatctctgtcactgccagtgggatactatgagagcctactttgtgtctctcagcctcactttcctcatttgcaaactggggacagtagcggtaccagcttcacagtttgctatgaaaattaaatgggagcacgcctgtcacggcccatggtggctgcatctccagctggaagagttctgtgtgtggctgaagcaaaggtcagaagacagggctgagtgatgtggctcgagaggttgactggggccaggaggccaagacctggagtggctaaggccccagaactggtccctgtaagaacagcacacgtggtctcacctcccccaccagacagggagctagcagagagcagggactgcgactttccggttcctcacgggccagcgccaaagaggtctgccgaggattcacgccatgaccgttcccctccctcctgcagccaaacgctctgtggcggagcacaggagacacggagggcagaaggcgggtgaatggattctggggggtggggggtggtgggagtggtttcagtcccttgaagctgactgcatggggctcaactcctggaggacccagaaagagtgaggaagagaggtgtgggctcaatctgggcagcctgcttggaggagaaggtggtccaccctgggaacagaagacaggagggacaagcaggagtcaaggaagataccatcgaaggcatcagttcagaatctgacctgtcaccagacggacctgttaaaatacagatttcaaagctcacccgctgacagtctgataagagggtctgagacggggctgcagactgtactataaaagcttgtaggtgactcagatcaccagccagctctgccaacacctaaggacttaaggcaggattctcagaaagacacattgggtttcagaatcacctagtaggtaggtttttgttcaaactacccaagcacctgcctagtttctgaagggtgtccccagggatcagcccctgagagtcgacagcagtcttggcgagcagttgacaatggcagtggtctgggttggcaactccagtgtcaggtataaagatggcagtgtgagggcagtgtgggatcgatcagaggcagcaggggcaaacaggagagagggcggggcctggacacggccagcagagggcccaggggcccgatcagagcagtttgggcttggttggctcccaagggaactgagtagccctggagggttctggagtgagcatgagtgagccctggggcaggaggactcattgggatgtgggctgacactgcaccggcattgggagatggtgacacatggtagaaacagacaggtctgcatctgaacccaggctcagcctcgtttcagctgtgctgccttggcaagagacttgccttagaagagacttcgtcttttcctcaatttcctcagctgcaaaatggggctattatcacatacctggcaggacccagggaggatgaaatgggaagatttatgtgaagtgcccaactgactgcctagcacccgggagttaattctcttaattcttgttccccttcccacaagaggcacccctcttagagaccagaaaggtttctctgcaaagacggaggccctgggtggggggagggcccgctctnnnnnnnnnnnnnnnnnnnnnnnnnnnnnnnnnnnnnnnnnnnnnnnnnncctcccccacaagccacctggcccccctcccacctccacatatgggttggggggtggggagaggcagcaaacagccaaaccctcccaaacaggagttggtttccatggtaacgagggtaccaggaggaaggggggcgctccagatccagctgtcccccctgagcgccctacccgggccccagagcctctgctgatgcccacctaacaccctggacccccatctgcctgctctggggggacagctgggaccgccacgagcactcccttcactgtgctcagagtacgtctgccacctgggtaccgccaggggcagggtaggcagccccaagcaggagcccccagttcaagtccatccacactgctactcactgcgtccagccacgagaagccccatcagtactctgcgcccccaggcccaactacccatcatggctcttagaacgagagggtttatccagttacagctcccaaaagggccagagactgggtgagttaaggccctttggctatggatgagaacacagaggaccagaacaggagagagctttgctccagttcaacacactcgagatgacggtcctctacaggggctgtccccacccctcacccactcccaactccacagctccaacagaccctgaggggctgagctagggcacctggcacaatgctccagagagatgggccatggccagagagaaggaagaaaggcctaaccacccaaaggcctgtctagtgacagaatgggcagtgctggaggctgcaagctcccagcacctcggagtgtgtgagaaagggagtaatctaggaaggagccttgacagcaggtgatgggctccatgactccccaactctcctggagacggaagtcagacttggacgtgataggaggaggcaccaacgtgaacctgtttctcggggacacatccacaagatggtaggcaggccacaggctcagatagggaaggggtgctgaggagtcagctgcgaggtaagggagacagtggcggcggggcgggggcggggggcggggctctccctgctacagccataccctagaagccctcaccgaagccttcgactacacctgcactcctcacaagacacagaggggcttccaaagctctttggaccccatttagcggccaccaccagccaccactcaaaagataagagaaggtgggctgctagaaacaagcttgccccctttccaatccctccccaccccagccctaatggcacaggaggaaacacatgagtttggggtgtataagggggttcagttctcaggtctgccagttcttagggaggtgatcctaagacaagtcttctccacctgggaaagtgggatgctaataccagcctggaccggtgggcgcttgctccccagccctctgagcccttccccttctctggcagagcccctccactccactcagttctgaagctgggttctcagggcctgcagacaggggagccccaacccgcagaaagtgggggctggggggggcactgaactttcgaacctgcacacccccctccccgcgccgttcattaccttaacaggagttaaaaataaccgtctcatctctttaaattagtctgtctgcaattaccgcctggcacggcgctgcccgccatcgtcccgctggagcggcgccaggtggcaggcgggggccctcaccctgtctgtcagtctgtctgtctgcctccgggtccgcccctccttctcccctcagaggtgcagctaccccaggggcctcctggcggccctgcctctcgagctccccaagttgctggggaggggcggcccggggggccacgcacacggctggcagaactgagggggccttcgttgaacagaggactgggaggggatgggggcgggggcgggggggcgcggtagcgggggaggggcgccgggaggcccgggaagccggaagggcccgccgcgcgccagcgctcgtgggtgggtgtgagcaggtggccgtgggagtctgccgggcgtgccagcaactgtgccaggagcggctggcacgggctcgtgcccaggaggcgggcagctgccagccccccgctcgtgcagcgcggggggtgaggacaccccccaacccgggctcacaccgcctcctcccacacccccaccagccctcggggctggggatccccggaggacaaaggaggaggagggagccctgctggaacgggctgcggggaggagagaagggggagctctgcaagcaaaccactgctcagccgggctgtcgcaggaccctcctcctggcctcagggagcagcccctcccttctataccccaccccacctaggacctactggccagcctgggcgggatggggggtagggcaccacccctcctgatcccaccccacaacagccaagctgctccaggcactgagggagaagggaagtccccctccacggggctcctccccacccatcctggggacagcaatgggaggcacccaggtctggcctgaaagctcccaggggagctggcagccaggaaacacaaaagcaggcagaacaactccaggggtgctaagtggaaggagcaccaagatccagagtagcctggaaggcttcctggaggagtccagcactagggaaggaggggctagagtgtcagaggaagtgggagaccctacttggatggtaagggacagggaggcctggcacgctacagtccatgggggtagcaaagagtggacatgacttagcgactgaacaacaataacaacctggatgtgggacagccacacttccggaccctgtagagggagggagacttcctgtccaagccctcggccccggacctggagaccctatgccctgatggcaactcttccagcctctccggcaccaagcccagtctctcttcgggcttcagcctgctgggtgccttgcgcctgctgatgatcttgcctcctccaattcctctctgcaacacctctgaactgtcatcccacatccctggttgggccacagggcaaaagtcaagcccttcctgatctggcccactcggcctttcccatgacacagccctgccccctccaggagcccttagttccagcctggcacgcccaacagtctcccaaacccagcgtatgaattccacctccctgtctttgcatacacagtcannnnnnnnnnnnnnnnnnnnnnnnnnnnnnnnnnnnnnnnnnnnnnnnnnnnnnnnnnnnnnnnnnnnnnnnnnnnnnnnnnnnnnnnnnnnnnnnnnnnnnnnnnnnnnnnnnnnnnnnnnnnnnnnnnnnnnnnnnnnnnnnnnnnnnnnnnnnnnnnnnnnnnnnnnnnnnnnnnnnnnccttggaagtctttcccccaattctacccgccttccccacccagtgaagacagaccagactgccacccagtgaagacagaccagatagagtgccatattctctgggagggcttgcctggctccccaggggatctccctgctttcaccacacccctgtcccccagccctgtcccccccagtccccaccccccagcccttcctgcctgtaaaacgcagggcttgggtagccgtgatgcatcctgaaggtaggtccaatgcctcccccactggtccccccactctatctatcacagggttcagtacacggcaggggctgaagggcaacacttatgtgggggaggggagggaagaaggaacaatgggtccctggccccaaccctggcacctgaggtgtcccataggctctgtaaccagagggtggctgggagttgggaatggcccctccacccagcccctggagggactgactgggaatgggggaacaggtggtgggaggggcgggaatgagaggggaaagaggctccctggggagctggatgcaggtgggatagaaggaggacagccattgaggggatgagacgggaaaggccagaggtctttctgaacagccctcctccgctgctgcgggggtctctgccagggtctaggtgaggagcccaagcctgaggacccctcaccaatgccccagcccagggcaagccttcctgagcccaggcacagggagaagcagtgtgtccccagcagtgtggtgcagaggaacccgcatccaacgggcaggcgggaggcctgggccatcatccagggcctgccgctcactgatgacctaagaagagtcccattccctgccagggcctcagtctaacagtctgcaaaatgaactcatgggactatattatctccaagtaccttcccaatcccattctcagatttagatccatccctgtttgaaagttgccagtgtccccctgccacacccagggcaagcaggacactattccagaggctctgggtccctggagggagacacacagagattggaatccagctttcccatctactgactgtgaccttgggcagtttgcttctccactctgtgcctcagggcccagttctgtaagtagtgacagtaaaacccacctcaggcagtgcagagggcattaaaggtgacacctggcgcagatgcctaaagctgcctggcagagggcttggccctgagaccctcagtgcactgtagttttttcccaggttcaagcctcatgttccctcttgccatcttccccatcatccctaacccttcaactccaattggagctccgcctcctgcaggaagccctcctggcttgctctgactcacagtatcctccctggtctcagcaccctctgcactatccactcactcctttactcttttaccagacatgcactggtagctcctggtgccaggctctatgcttggtgccatgggcacagagattgatctaaccactgccactgttttccaaagagggtggggaagggaaatgagacaggacacaaaagactaagacttatgacaggtagggagaggacctgagctagcgaaaaggggttaggaaaggcttcctggaagaggtgtctgaactctgcccttgaggacaggaattatccacaaggagaagcggagggtgggacagtgcaggggagggaggtgggagcaaagcacaggacccacttaggaggaacaagtgttctgctgggggctgagcccagggggaccagctagaggatggagagaaagactcaggcctgctactccagcctgcgtccccaccccgtagtggccagagagacagaggagctgccagcataaaggctgagagccatgggctcccaggtcaactcccaggtcaacacagccaccgggcatctcgtgctgttcatgtccacaagcctcccctcctccactggcacacctccttcccctgacactgcctaccaccaccagccacagcccttgccctccatttaggcatgtctccctcatagagaccccctcttccacagggagcctgacagcttacaggccctaggcatggcctgaccacccctaccccccagcctcctctcctccaaaggcattgactatatccattccccaacaagttagccaggggaggatctggaggccacaatccagtcaagaccccgtcctctcccaagatggctcccccctttccagtggttggtactgaggcctccctggggtgcccctcccccttcccccacccccaaatgcatctgggctcagaaaatcagggaagtgggagacagacagcctggggtgggcacagacagatccccaggtctcaacaccctgccctcacaccagcaggggtcatcaccagcccaccatgctgatccaggcaagggggggacagcagctgccccatggagaactcagatcacctgaccagttccccaccttagactggctggtgccctagggtgaactcctggcactacagaaagaactgtgggcctagggtcgcattcctcaccctgaggccagcttcagggagggcagtgggaaagatttgggaggaaagcagccaccggcccggtcattatttcagctctttaaggagggtgccctggtggagagggtaaaacaagagtaacagaaagcaaactcgggaggtaacagaggggtccccagtgtctgaggcctgagaataggctcttctgctatgcccccaaggatggggtgagggtatccctcgggggtgcctcaaagtggcagtcccttgtcaccctaccagacctcccaccctgcatccagagcatgcacacagctgctcccagcacgcccccgcctgtctgccggccggccccacgccctgggcacacactctgtgacccctgggggtgccccagggtttccctccagaccaactaccgggtgcccagggacatctagcagcccttggaagccccagccaacggctctagcacccctcccagccggacgcccccaccttccagccggccgagctgttgctgtcgcctttatccttgaagtagggcacgtaacggaccatccagtcgtagatctgcgagagcgtgagccgcttgtccggggcgctctcgatggctttggtgatgaggtcggcgtaggacaggttcccccacgcgttccgccgagagctcttcgctttccgcagcggtccgacctccgcgcccagcggcggcgctggggccatcggcggggccgtggcccggcgctccggcccgcagtcctcggcgctctcggccacccccgaacccagcgctccgtcctcgtcgccgaccaagtcgggctgcggcaggggccaggtacacgagcgcggccggctctgcggcgcgaagtccgggtccacgtccacctgatgcgctcgcagcttcgcagccatggtcccgcccggcttgggcgaggaggggaggggggctccgcggagggtgggcgggcggctccgggatctgcgcgccccggggaggcccgcgggaggggtccctggcggcgccggctcaaccgcggggcgccatgggccaggtcgcggagacagggggctggacgcgctgaaaagcccgaagggaggaaaagaggggggcagtgagagagcggcggccccggagcccaacgggcacacacctcgccagccccgcttctagcacctgccgcctgcttgtgcctgcagccaccannnnnnnnnnnnnnnnnnnnnnnnnnnnnnnnnnnnnnnnnnnnnnnnnncctgcgggctggaggcggaggcgcggggctcccggccgggggcgaccccgccgcagcccctgcatgcaacagcgccgcctacggagcagggaagacaaggcaggcgcgaccccgccccctgctttgctctaggggagggggcgcgggggcggggcccgggcactctcattggtccgaagcagggctgtcccgcccacggactcggctggatccctcccctgagcgcgtcagcgggttattgttacaacccggggtttcccggggcaacagggatgaggcggggctcagagcacatggccccgccttctattcccgggaggaatgccccgccctctgtttctagacccttggtatttccaaatcttcgttccagaaacctggtggggtggatgatggagttcttctgttctttgtgccccgggctggggaaaaggagagggtcaagaacacctgggttctgggtcaggcttggccacaattttggcttctccatctgcaagttgtttttcgtaggcattcagagtgcctggtttaacgtgtagtagaatcaacctggagagcttgttgaaacgttttactgggccccagccagattactgggttgcggcttgagactttgcatttctgacaaggtcccaggtgatgcacccgggaccacactttgcaaaccactcttttagagtctgttgcaggctgttgccagggttgttggaacaaacacttgcctcaaatttcatcctgtttggggagaagtttctcgttcacttactatatttattgagcacctttgatgcatgtgcactgttccagctactaaggcgagagcagcaatggagacagatgaggtctctacagcataggctgtgaagaagtcaggtgttgtcagatcactgtatggcctcagtagtagagaggccagccgagcaattgggcagcccat

SEQ ID NO: 5 - DNA, 8328 bp, Bos taurus
atggatcctgaacaaagtgtcaagggcaccaagaaggctgagggaagtccccggaagcggctgaccaaaggagaggccattcagaccagtgtctcatctagcgccccgtatcctggcagcagcacagccgccactcaagagggccccctccaagagctactagccccgcagcccttcccaggcccctcgtcggttcttagggaaggctctcaggagaaaactggtcagccacagaagccccccaagaggtcctccatcgaagcctcagtccacatctcccagcttccgcagcaccctctgacaccagcattcatgtcgcctggcaaacccgagcatctcctggagggatccacatggcagctggtcgacccaatgagacctggaccctcaggctcttttgtgacccctgggctccatcctcaaagccagctcctctcttcccatgcttccatcattcctcccgaggacctgcccggcatccccaaagtctttgtgtcccgtccctcccaggtctccttgaagcccacggaagaggcacacaagaaggagaggaaaccacagaagcccggcaagtacatatgtcaatactgcagccgcccctgtgccaagcccagtgtgctccagaaacacatccgctcacacacaggcgagaggccctacccctgcggcccctgtggcttctccttcaagaccaagagtaacctctacaagcacaggaagtcccatgctcaccgtatcaaagccggcctggcctcgggaatgggtggcgagatgtatcccccagggctggagatggagaggatccctggggaagaatttgaggagcccaccgagggagaaagcacagattcggaagaggagacgggcaccacttccacacaccccacagagctctccccgaggcccaaacacccactcctgtccagcagtttatacagctccgggagccagggttccagccacgaacgctgttccttgtcccagtccagctcggccccgtcgctcgaggacccagctccctttgcggaaccctcatccgaacaccccctgagccataaacctgaagacacccacacgataaagcagaagctggccctccgcttgagcgagaggaagaaggtgatcgacgagcaggcgttcctgagcccgggcagcaaaggcagcaccgaatctgggtatttctcacgctctgagagcgctgaacagcaggtcagccccccaaacaccaacgccaggtcctatgccgagatcatcttcggcaagtgtgggaggatcgggcagcggactgccatgctgacggccacttccacccagcccctcctgcccctgtccaccgaagacaagcccagcctggtacctctgtccgtgccccggacgcaggtgattgagcatatcaccaaactcatcaccatcaatgaggccgtggtggacaccagcgagatagacagcgtgaagcccaggaggagctcactgtcgcggcggagcagcatggagtcacccaaatccagcctctaccgggagccactgtcctcccatagtgagaaagcgaagcccgaacaatcactgctgagcctccagcgcccgcccagcaccaccccccctgtgcctctgctgagaagccactcaatgccttctgccacctgcaccctcagtaccccccaccacaccttccgaggcagctactccttcgacgaccacgtcgccgactcggaagccctgagccgcagcagtcaactgtttacctcccacccccggatgctcaagcgccagccggccatcgaactgcctttgggcggagagtacagttctgaggaggcagggcccagcagcaaagacgcagcctccaagcctgcagatgaaccggaacccagggaaagcgacctcaccaaaaagaccaagaagggtttgaaaacgaaaggggtgatctatgaatgtaacatatgtggtgctcggtacaagaaaagggacaactatgaggcccataaaaagtactactgctcagagcttcagttggcaaagccagtcaccgtgggtgctcatgtatcttcggaggccgagaagagccaggccgagcatgagccctggtcccagatgatgcattacaaactggggaccaccttggaactcactccactgaggaaaaggaggaaagagaagagccttggggatgaggaggagccgcccagctttgagtccaccaagagtcagttcggcagccctgggccttcagaggctgctcggaaccttcccttggagtccagcaagtcaccagcagagccgaataagtcagtgccctccctggagggatccgcaggcttccagccaaggactcctaagccagggtccagttcagaatcagggaaggagaggagaaccacgtccaaagaaatttctgtcatccagcacaccagctcctttgagaaatctgactctctggagcagcccggcagtttggaaggggaagacaagtctgcggcccccttctcatcacccccgcctgccccgcacggacgctcggcccactccctgcagcccaggttggtccgccagcccaatattcaggttcccgaaatcctggtgaccgaggagcccgaccggccagatacagagccggagccaccccctaaggagccagagaagacagaggagttccagtggccccagcgcagccagacacttgcccagctcccagctgaaaagctgccacccaagaagaaaagactgcgcctggcagagatggcccagtcatcgggggagtccagctttgagtcctccgtgcctctgtctcgcagcccgagccaggagagcagtgtctcactgagtgggtccagccgctctgcctcctttgagagagatgaccacggaaaagccgaagccaccgggccttcatcagacacacgctccaaacccttgggcacccacatgctgaccgtccccagccaccacccgcatgcccgtgagatgcggaggtcagcctcagaacagagccccaacatctcccactccacccatatgaccgagacacgcagcaaatcctttgactatggcagcttgtccttgacaggcccttcagcaccaactccagcagctccagtggcctcagcagccccaccagagagaagaaaatgctttttggtgagacaggcttctctgaccaggcctcctgaaaccgagccagaagccacccccaagggaagacaggagagtgaggaaccaaaaccctcatccagtaaatctttggccaaaggcgcattgctcccagtttcctctgcagccacctcacacagcgggcacccaggaggcaagagccaggtgcaagacagaccagcgctgggggccactccgccctacacagaagcactgcaggtgttcccccaccccatcgctcagctcccgttgcaggagaaaccctacctgcccccgcctgtctcccttttctccttccagcacctcctacagcatgagccaggacagtcttcagagttcttccccacccaggccatgtccagcctgctctccacaccttactccatgccgccccttcctccctccttatttcaagctcccccacttcctctccaacctactgttctacacccgggccaactccacctcccccagctcatgcctcacccagccaacatcccattccgacaacccccttcatttctccccatgccttaccctgcctcctcagcactttcttctgggtttttcctgcctctgcaatcgcagttcacccttcagctccccagtgaagtggaaagccacgtgccccagatcaaaactagcctggccacactggcaacaggaacccctggcctctcccccagcacagagtacagcagtgacatccagctgcccactgtggctcccccatccagctgctcagcacccacatcagcccctccactggccctgcctgcctgtccagacaccatggtgtctctagttgtgcccgtccgcatccagaccaacatgccatcctatgggagtgccatgtacaccactctctcccagatcttggttacccaatcccaaggcagctcagcaactgtggctcttcccaagttcgaagagccctcatgcaaagggacgtctgtgtgtgggacagatgcgtatgaggtcgggcccagactggctggagtaagtgaagaacagagcagaggtttcccgactccattcttgagagtgcctgtgacattacctgaaagaaaaggcacttccctggcatcagaaagtgtcttgagcctggaggggagttcatcaacagtgggaggaagcaaacgtgtcctttcaccagctggcagccttgaacttaccatggaaacccagcagcaaaaaagggtgaaggaagaggaggcatctaaggtggatgaaaaatttgaacttgtaaaaccatgtagcgtggtgcttagcagcaccgaggatagcaagagatcggagaagtcctacttgggcagtcagggccagggcaggagggaactagaaacactctccagcctgtcctcagatccatctgacccaaaggaaattcctccccttcctcagccctcattgccccatgtgacaacctcaggatcagaggctttgaaggaatatgcccaaccatctggtaaacctcaccgaagaggattactcccatcaagtgtgaagaaagaagattccaaggaacaagctgacctccctccactggcacctcccagctcacaatctctgtcagaaacatcccccagaccagccaagttgcaagaaggtacggactcaaagaaggtactgcagttccccagcctccacacaaccactaatgtcagttggtgctatttaaactacattaagccaaatcacatccagcatgcagataggaggtcctctgtttacgctggttggtgcataagtttgtacaaccccaaccttccaggggtttccactaaagctgctttgtccctcctgaggtctaagcagaaggtgagcaaagagacatacaccatggccacagctccacatcctgagacaggaaggcttgtgccatccagctcccgcaagccccgcatgacagaggttcgcctcccttcgctggtttccccggaaggacagaaagagatagctagagtggagaaagaagaggagaagagagggaagccggaggaggacgctcccgcctccaagagaggggagccggcgaggatcaaaatcttcgaaggagggtacaaatcaaacgaagagtatgtatatgtgcgaggccgcggccgagggaaatatgtttgtgaggagtgtggaattcgctgcaagaagcccagcatgctgaagaaacacatccgcacccacactgacgtccggccctatgtgtgcaagcactgtcactttgcttttaaaaccaaagactgtgttcccgctccacccagcttctccacagccctcagcactgggcccggctctcccctcaccttgactggcagccctgtcattctgccctggccacgcagcacctcagggtcagctcaggctctggcagtcacctgtgagaagaaggcagactggccaggcaggaaaggcatcgtgacccacttcttctttcctggtagccgagtagaccaaggtgcctcagagggaggcctgggctctcactgctcccagagagagaggctgggtggctttgaggaggcccctccggactttgagtcttccttcttcctcctcctgatcccttccattctgtcagtgctagacgttgtgacagcagctccggtcctgggtgctagcaccggcttgtctcagttccccgaggccagcagaagggctgtggtgggtacaggcccttgcgccgatcgcctgcggacagagctggcagtttggagcagccctcaggggctgagggagggtggttggtcaaagcccaaagccgaatggggtagacacggttttcagcttatgctcttggtagaggatccacctgtgttccagatgcccatcatttccatccgcttgcctttcctccttcattccaggatggtcagatttgggtgcgtggctgtggcagagtctcccgggtgctccatgaacactgactgttggggcaggggggacacacagaatgggaaggagggaggttccacgcagtggcatctgctctctgccaggcacgctctgctgccactctacatgcgtttgttcgtccgcttctcccagcatccccatgagtatggagcacgcaaggcacctgcagtcctgagacctggctccagacggggctctgcgctagctggcaacgtggctttggctgtttggttctccgtgatggtgaacaggagctgtcccagagcatcccgtcacctcagacagtggattatctcgtccagtggcatcattagcaccaaggccaggagtcagaacagaagcaggaagaccctgggcctgaggatggccggccggcgccgcagccccgcccctgagggtgaggaggttgagcaccagcgccaccgtgtggccagacctccccagcgccccggcgcgcttcgttccacccgtcccttggctccagagaggcgggactttgtggagattgacaagctgaccccgctggtggggctgccccagcagaagtcagaccaggaggctggaaccagtgatgacccattccaggactcggaagggcgagagggcgcagaggccgtggcagagcaccagttttcagacctggacgactcggactcggactcggacctggacgaagacgaggatgaggacgaggaggagagccaggacgagccatcaggcccgtcctcggaggcgcccccacctggcccgccagccacgctgcccgcagactcctcacccgttcagggccctcagcccacagaggccacccggggcagctcggtctcagaagccgagcgctcggcacccagcagctgctccacatccagccaaagcatcctgtgcctcccccggctggcaccggccccccggggcccagtggagaaggacacaggctcggccctgagctcccaggccctgtccccaaggaggccgtggtccccaagcaaagaagcaggcagccacctaccactcaccccaaaacactcactaaccaaaagctactcgtctccccagcgacattcaccggcccgagagccactggcctcagccccgagtccgcctggctcccagacgggccctctcccctgcgggtccccgagactcgagctgtcgcctcttgccctccaccccctgggaagggaactgccacttcgagcgcgcctgccccccgaacgcaagggcgctgcagacccaggcccccccagacactcgcccaccaggagatggtctccaggccaggccgagtcaccaccacggtcagcgctgccagggaagtgggccttggcagggccgggcagccccttggcggccgagcgtggcccaggctcagggctggccccccgggctctctacccgcccgcgcctctacctcacaagcttctcggcagaagcccagcggagacctgcacctccacatggcagaaggccgagtcgccaagtccgtcctgttcacctgctcccgctcatcctctcttctcccgacccttctcggccccccatgacttccacggccacagcccggcccggacggagaacatcttcagccacctgcctctgcactcccagcgcttgacccgcgccccgtgccccctgattcccatcggcggaatccagatggtgcaggcccggccgggggcccaccctatcctgctccccgggcccagcgcggcctgggtcagcggtttctcggggggcggaagcgacctgacagggtcccgggaggcccaggagcgaggccgctggagccccaccgagagctcgtcagcctccgtgtcccccgtggccaaggtctccaaattcacactctcctcggagctggaggccagggactaccccacggagagggggaggacgagagggggcctgggcagacctcccgactgggagccccgtgcggcccaagtgcccacagagcccacgccgacgcacagcccccgcacccccccagagacctcaccccgggcacccccaggccaccgggcagagtcccggagcccccacctggagtcaccgcgggtgccggccaaccctgcggcctccgccaccccgccgctggaccgcagcagttccgtgggctgcctggccgagaccgctgctcgcttcccagcccggaggaggaacctctctggggaacccaggaccagtcagggctccccccagccctcgggaagtggggggtccgggacacctccacaccagcccgaggagcgggggccccggagcacttag

SEQ ID NO: 6 - DNA, 1247 bp, Bos taurus
aatgagctgtcgctcagcttggcagcaggacgctggcagcaggcacactccgcactccagcccagcctgagcgtgcctcaccactgtggtcgccatgcccaccgccttgtgctccatcgctctagccctgctcgtggccctgcacgaaggcaagagccaggctgctaccacccccatcccagagcaaccagcgcccttgccccgggcccgaggctcccacctgcggactcgacgttgctcctgcagctcctggctcgacaaggagtgcgtctacttttgccacctggacattatctgggtgaacactcccggacagacagctccttacggcctgggaaacccgccaagacgccggcgccgctctctgccaagacgctgtgagtgctacagtgccagggaccccgcctgtgccaccttctgccatcaaaggccctggactgatgcggtggcagtcccaggcagcgggtcccctgcagctgcgttccaggatggcaagacacaggccacagcaggagagctcctccagcggctgagggttatttctgcaaccaagatccactttgctaggcaacagcagaagccgacgagggagaccagacctacacactccaggcagaggaagagatagctctcgactctgggagaactttgggaaggaagcctgtgtggatacaggaggagaggggcatcccagagctgggagaccttccgacctgtttcctgggccagaaaacccagctgctggagcaggcacaagctctggcctcctcgccctgggagggggcctcgctcaaggcagctccgtgacaccaggaaagtcatcaggccccaggctgcagcgtggcctcccacactggctccagttcctaggccctgctgaaaggaacggcatgcggaatgtgctagcctggaggtgtcctgtctggcggctgtgaaccaggaacaacgtgcagtggcgggcactcacacccaagccagcccgagtccttccagggttgaagtcccggccgcccccgacccctcacccccgctctgtcccctccggccctcgctctccagtgtccttattctcccttcataccctcggggcactcttggtgagaagggcctgcaccacttcacctgtctgtatataacttatttgctctaagaaatttgacgattccgattatttattttaacgtatttttttagactctcaattattacctgcgaacttgtgtttgtaataaacaacaaaataatgc

SEQ ID NO: 7 - DNA, 1608 bp, Bos taurus
  unsure (410)..(460): Unknown sequence
  misc_feature (411)..(460): n is a, c, g, or t
atgggctgcccaattgctcggctggcctctctactactgaggccatacagtgatctgacaacacctgacttcttcacagcctatgctgtagagacctcatctgtctccattgctgctctcgccttagtagctggaacagtgcacatgcatcaaagcccggggcacaaagaacagaagaactccatcatccaccccaccaggtttctggaacgaagatttggaaataccaagggtctagaaacagagggcggggcattcctcccgggaatagaaggcggggccatgtgctctgagccccgcctcatccctgttgccccgggaaaccccgggttgcggcgctgttgcatgcaggggctgcggcggggtcgcccccggccgggagccccgcgcctccgcctccagcccgcaggnnnnnnnnnnnnnnnnnnnnnnnnnnnnnnnnnnnnnnnnnnnnnnnnnntggtggctgcaggcacaagcaggcggcaggtgctagaagcggggctggcgagcgcgtccagccccctgtctccgcgacctggcccatggcgccccgcggttgagccggcgccgccagggacccctcccgcgggcctccccggggcgcgcagatcccggagccgcccgcccaccctccgcggagcccccctcccctcctcgcccaagccgggcgggaccatggctgcgaagctgcgagcgcatcaggtggacgtggacccggacttcgcgccgcagagccggccgcgctcgtgtacctggcccctgccgcagcccgacttggtcggcgacgaggacggagcgctgggttcgggggtggccgagagcgccgaggactgcgggccggagcgccgggccacggccccgccgatggccccagcgccgccgctgggcgcggaggtcggaccgctgcggaaagcgaagagctctcggcggaacgcgtgggggaacctgtcctacgccgacctcatcaccaaagccatcgagagcgccccggacaagcggctcacgctctcgcagatctacgactggatggtccgttacgtgccctacttcaaggataaaggcgacagcaacagctcggccggctggaagaactccatccggcacaacctgtctctgcacacccggtttatccgcgtggccggccccgtgcttggtgcacccggggagctggcgctggcgggcgctgccggcacctaccctggcaaaggggtggccccgtacgcgccgccggcgccctcgcgcagtgccttagcccaccccatcagccttatgacgctgcccggcgaggcgggcgcgacgggtctggcgccgccgggacacgcggccgtcttcgggggaccccccggcggcctcctgctagacgcgctgcccgggccgtacgccgccgccgccgccgggccgctgggtgccgcgcccgaccgcttcccggccgacctggacctcgacatgttcagcgggagcctcgagtgcgacgtcgagtccatcatcctcaacgacttcatggacagcgacgaaatggacttcaacttcgactcggccctgccgccgccgccgcccggcctggccggagccccgccccccaaccagagctgggtgccaggctga

SEQ ID NO: 8 - protein, 2775 aa, Bos taurus
MDPEQSVKGTKKAEGSPRKRLTKGEAIQTSVSSSAPYPGSSTAATQEGPLQELLAPQPFPGPSSVLREGSQEKTGQPQKPPKRSSIEASVHISQLPQHPLTPAFMSPGKPEHLLEGSTWQLVDPMRPGPSGSFVTPGLHPQSQLLSSHASIIPPEDLPGIPKVFVSRPSQVSLKPTEEAHKKERKPQKPGKYICQYCSRPCAKPSVLQKHIRSHTGERPYPCGPCGFSFKTKSNLYKHRKSHAHRIKAGLASGMGGEMYPPGLEMERIPGEEFEEPTEGESTDSEEETGTTSTHPTELSPRPKHPLLSSSLYSSGSQGSSHERCSLSQSSSAPSLEDPAPFAEPSSEHPLSHKPEDTHTIKQKLALRLSERKKVIDEQAFLSPGSKGSTESGYFSRSESAEQQVSPPNTNARSYAEIIFGKCGRIGQRTAMLTATSTQPLLPLSTEDKPSLVPLSVPRTQVIEHITKLITINEAVVDTSEIDSVKPRRSSLSRRSSMESPKSSLYREPLSSHSEKAKPEQSLLSLQRPPSTTPPVPLLRSHSMPSATCTLSTPHHTFRGSYSFDDHVADSEALSRSSQLFTSHPRMLKRQPAIELPLGGEYSSEEAGPSSKDAASKPADEPEPRESDLTKKTKKGLKTKGVIYECNICGARYKKRDNYEAHKKYYCSELQLAKPVTVGAHVSSEAEKSQAEHEPWSQMMHYKLGTTLELTPLRKRRKEKSLGDEEEPPSFESTKSQFGSPGPSEAARNLPLESSKSPAEPNKSVPSLEGSAGFQPRTPKPGSSSESGKERRTTSKEISVIQHTSSFEKSDSLEQPGSLEGEDKSAAPFSSPPPAPHGRSAHSLQPRLVRQPNIQVPEILVTEEPDRPDTEPEPPPKEPEKTEEFQWPQRSQTLAQLPAEKLPPKKKRLRLAEMAQSSGESSFESSVPLSRSPSQESSVSLSGSSRSASFERDDHGKAEATGPSSDTRSKPLGTHMLTVPSHHPHAREMRRSASEQSPNISHSTHMTETRSKSFDYGSLSLTGPSAPTPAAPVASAAPPERRKCFLVRQASLTRPPETEPEATPKGRQESEEPKPSSSKSLAKGALLPVSSAATSHSGHPGGKSQVQDRPALGATPPYTEALQVFPHPIAQLPLQEKPYLPPPVSLFSFQHLLQHEPGQSSEFFPTQAMSSLLSTPYSMPPLPPSLFQAPPLPLQPTVLHPGQLHLPQLMPHPANIPFRQPPSFLPMPYPASSALSSGFFLPLQSQFTLQLPSEVESHVPQIKTSLATLATGTPGLSPSTEYSSDIQLPTVAPPSSCSAPTSAPPLALPACPDTMVSLVVPVRIQTNMPSYGSAMYTTLSQILVTQSQGSSATVALPKFEEPSCKGTSVCGTDAYEVGPRLAGVSEEQSRGFPTPFLRVPVTLPERKGTSLASESVLSLEGSSSTVGGSKRVLSPAGSLELTMETQQQKRVKEEEASKVDEKFELVKPCSVVLSSTEDSKRSEKSYLGSQGQGRRELETLSSLSSDPSDPKEIPPLPQPSLPHVTTSGSEALKEYAQPSGKPHRRGLLPSSVKKEDSKEQADLPPLAPPSSQSLSETSPRPAKLQEGTDSKKVLQFPSLHTTTNVSWCYLNYIKPNHIQHADRRSSVYAGWCISLYNPNLPGVSTKAALSLLRSKQKVSKETYTMATAPHPETGRLVPSSSRKPRMTEVRLPSLVSPEGQKEIARVEKEEEKRGKPEEDAPASKRGEPARIKIFEGGYKSNEEYVYVRGRGRGKYVCEECGIRCKKPSMLKKHIRTHTDVRPYVCKHCHFAFKTKDCVPAPPSFSTALSTGPGSPLTLTGSPVILPWPRSTSGSAQALAVTCEKKADWPGRKGIVTHFFFPGSRVDQGASEGGLGSHCSQRERLGGFEEAPPDFESSFFLLLIPSILSVLDVVTAAPVLGASTGLSQFPEASRRAVVGTGPCADRLRTELAVWSSPQGLREGGWSKPKAEWGRHGFQLMLLVEDPPVFQMPIISIRLPFLLHSRMVRFGCVAVAESPGCSMNTDCWGRGDTQNGKEGGSTQWHLLSARHALLPLYMRLFVRFSQHPHEYGARKAPAVLRPGSRRGSALAGNVALAVWFSVMVNRSCPRASRHLRQWIISSSGIISTKARSQNRSRKTLGLRMAGRRRSPAPEGEEVEHQRHRVARPPQRPGALRSTRPLAPERRDFVEIDKLTPLVGLPQQKSDQEAGTSDDPFQDSEGREGAEAVAEHQFSDLDDSDSDSDLDEDEDEDEEESQDEPSGPSSEAPPPGPPATLPADSSPVQGPQPTEATRGSSVSEAERSAPSSCSTSSQSILCLPRLAPAPRGPVEKDTGSALSSQALSPRRPWSPSKEAGSHLPLTPKHSLTKSYSSPQRHSPAREPLASAPSPPGSQTGPLPCGSPRLELSPLALHPLGRELPLRARLPPERKGAADPGPPRHSPTRRWSPGQAESPPRSALPGKWALAGPGSPLAAERGPGSGLAPRALYPPAPLPHKLLGRSPAETCTSTWQKAESPSPSCSPAPAHPLFSRPFSAPHDFHGHSPARTENIFSHLPLHSQRLTRAPCPLIPIGGIQMVQARPGAHPILLPGPSAAWVSGFSGGGSDLTGSREAQERGRWSPTESSSASVSPVAKVSKFTLSSELEARDYPTERGRTRGGLGRPPDWEPRAAQVPTEPTPTHSPRTPPETSPRAPPGHRAESRSPHLESPRVPANPAASATPPLDRSSSVGCLAETAARFPARRRNLSGEPRTSQGSPQPSGSGGSGTPPHQPEERGPRST

SEQ ID NO: 9 - protein, 177 aa, Bos taurus
MPTALCSIALALLVALHEGKSQAATTPIPEQPAPLPRARGSHLRTRRCSCSSWLDKECVYFCHLDIIWVNTPGQTAPYGLGNPPRRRRRSLPRRCECYSARDPACATFCHQRPWTDAVAVPGSGSPAAAFQDGKTQATAGELLQRLRVISATKIHFARQQQKPTRETRPTHSRQRKR

SEQ ID NO: 10 - protein, 535 aa, Bos taurus
  misc_feature (138)..(154): Xaa can be any naturally occurring amino acid
MGCPIARLASLLLRPYSDLTTPDFFTAYAVETSSVSIAALALVAGTVHMHQSPGHKEQKNSIIHPTRFLERRFGNTKGLETEGGAFLPGIEGGAMCSEPRLIPVAPGNPGLRRCCMQGLRRGRPRPGAPRLRLQPAGXXXXXXXXXXXXXXXXXVAAGTSRRQVLEAGLASASSPLSPRPGPWRPAVEPAPPGTPPAGLPGARRSRSRPPTLRGAPLPSSPKPGGTMAAKLRAHQVDVDPDFAPQSRPRSCTWPLPQPDLVGDEDGALGSGVAESAEDCGPERRATAPPMAPAPPLGAEVGPLRKAKSSRRNAWGNLSYADLITKAIESAPDKRLTLSQIYDWMVRYVPYFKDKGDSNSSAGWKNSIRHNLSLHTRFIRVAGPVLGAPGELALAGAAGTYPGKGVAPYAPPAPSRSALAHPISLMTLPGEAGATGLAPPGHAAVFGGPPGGLLLDALPGPYAAAAAGPLGAAPDRFPADLDLDMFSGSLECDVESIILNDFMDSDEMDFNFDSALPPPPPGLAGAPPPNQSWVPG

SEQ ID NO: 11 - DNA, 121 bp, Bos taurus
taaaaagacaagagacatccagtagaggcaacagggtgcccaggcctgggcctcaggagamaagtttgggctggaggtggactctagcaatcattggctagagatggaaattcagcctata

SEQ ID NO: 12 - DNA, 121 bp, Bos taurus
cctgtaggatgcacactgaactgagctgtggatgaagcccagagaaggtgaataattgackcaaggtcacaggcttgacagggtgacactgaagtacaaactttcttgtccggctctgctc

SEQ ID NO: 13 - DNA, 121 bp, Bos taurus
aggggagaagacagacagaggatacccagcaatgccagctgggaggctggctccaccaccsggggctgctgttgtctctgatccagcttttctagtctggtgggatggggtaacatctgtg

SEQ ID NO: 14 - DNA, 121 bp, Bos taurus
ctaatctcttattaatggtagctataatacttttatatttaggactttcagaaaaacctgrtcaaagtcaacaatttcagcattatcttggggaaactgtgtgtgaatgagctccactgcc

SEQ ID NO: 15 - DNA, 121 bp, Bos taurus
ggggatttttcagtaagaggttaataaccagtgaggtaaacatgtataacaacctgcttayatgcacactgggaagtgtcatgaacctttctcacctccatgctgagtttccagagaacca

SEQ ID NO: 16 - DNA, 121 bp, Bos taurus
atactgtcagagcaggcatctcagaatcagacactttacctgatccctctcttacagagtstgaaacagctttcaagtattgggaagaggtagatgctccccataccaaaagcatccctgc

SEQ ID NO: 17 - DNA, 121 bp, Bos taurus
aaaaagtagagtgatgacagacccattatataattgaaacatgttataaagcctcaacaartaacacatgaataagaagtccagaaatggggtcagttacataaaggaatttaaaatttac

SEQ ID NO: 18 - DNA, 121 bp, Bos taurus
gatgagatgcatcgaaaactgcaatgccggcagctagcactggtcaacagaaagggcccarttctccatgctaatgcccgattgcacaatcaatgcttcccaagttgaaggaattaggcta

SEQ ID NO: 19 - DNA, 121 bp, Bos taurus
atctgcttggatcttctcattagcgaattccaagaagatgagccagatcagcccagggacygtgaagatcccagaggaggacacacactcccatcctgtgagcatttttcttatgtgtcaa

SEQ ID NO: 20 - DNA, 121 bp, Bos taurus
tctgagtgttcattgctgcaccgcctctccaagctcccaagggcatctctctacgtaataktaatgcctggccaggtcccatccattctgacagacaaaggacarrcgctactttacattt

SEQ ID NO: 21 - DNA, 121 bp, Bos taurus
acctgatgactattaagaaattaacacgtaatctacatgactggccagcagccccactcarggagttccttactcctaagcagttcttaggagttagaactcttcagttcagttcagttgc

SEQ ID NO: 22 - DNA, 121 bp, Bos taurus
aataacttaaaaattattgaagtgtagtttatgtacaatgtaatgttaatttcatatgtayggcaaaaccactcagttatacagatatgtatacatgtatactagaaaagaaccattctta

SEQ ID NO: 23 - DNA, 121 bp, Bos taurus
attctctctggtcatggctattcattcgtcccttcctacctacacttgccctgttccaggytggccatccttctctccatctgcccatttcctctggaaaagcaaccaccttgcagagaag

SEQ ID NO: 24 - DNA, 121 bp, Bos taurus
acactttccagttttagatatgctcatatagcaatgcttccatatctaagctttagtctcytgaagggtttgttgttgttgttcaatcacctagtcatgtccaactctgcaatcccatgga

SEQ ID NO: 25 - DNA, 121 bp, Bos taurus
atgtcttgagtaatacttttacttgttcagaaagtttatttgtttattttccataatgtaygtactgccagaatgttactcagtatactcttgtatctatcaaactttcagcagttaggtc

SEQ ID NO: 26 - DNA, 121 bp, Bos taurus
ggcccacgagtcctagccaggtggccttgccttgtggccctgttgagttgctttgatcacrtgacttgttcatacgtggctggtccataggttggagcagatttcacacacaaacccctga

SEQ ID NO: 27 - DNA, 121 bp, Bos taurus
agggagggtttggcactggcaaggggtccatggaacatggacagaatgaagctctgggagkgaggggcagaagcacatgaggaggtcaagcttcaggcccttcaccttgacacaatgggaa

SEQ ID NO: 28 - DNA, 121 bp, Bos taurus
caaagatttttggtctgatataaatgtgtgtcttctttttaggcctgtgatttttcaatgyaaaacaaaatttaaaacttcttataatagtatttagcaggagaaaagaaggagggaacta

SEQ ID NO: 29 - DNA, 121 bp, Bos taurus
atgttttgccctttgatattcacaaggcttccccatcctatctttctggcctctgataccktcttaccaccaccctccctttattctctgtccctactcagctttatttttttccacaggg

SEQ ID NO: 30 - DNA, 121 bp, Bos taurus
aaatggcatgcttcatgaagactcggtgcacggacctgatggaatgctgtgccacctccaytcttaggcctcgccaagaggcccccagtttctagtaggaaacaggtattaataatgcgag

SEQ ID NO: 31 - DNA, 121 bp, Bos taurus
accagatatttggtaatttgttgaatgaattaaatgcaaatggttttgaaaaaataaaagrtattattgttatcattgtctgttgtacctgttttcttcctttaaaagtcttggaaaattc

SEQ ID NO: 32 - DNA, 121 bp, Bos taurus
catcccatggaataaaaaagaatacagctttacacaaaactggttaatgataacttgcatrtgagctcagtcacttcagtcgtgtccgattctgcgcaaccccatggactgtagcctgcca

SEQ ID NO: 33 - DNA, 121 bp, Bos taurus
aacaaatgaattaagagatatttggttgccatgaatgttatgtggaaacaagacaactggygtgataaggaatctgggaaatctgcttacttttggtaccgaaagctgagctgacttaacc

SEQ ID NO: 34 - DNA, 121 bp, Bos taurus
aagattatactaatttttgtaaaaaggagattatagtatgattaaacattaacattcaaaygctgatttaaattgtgcatatatttttctcatttcttattgaatttatgatcattgatga

SEQ ID NO: 35 - DNA, 121 bp, Bos taurus
cgcccttttcctgtaacaagaggctagaattttccacttttattgccttggagaagaaacraagcagatgtctgcaggaaacaaaggaatcaaatttgtagtatttaattgccaaaggccc

SEQ ID NO: 36 - DNA, 121 bp, Bos taurus
tcagggtaggaaagctttatggtataattcatgctccaaaagctccccataggatcaggtkaacccacatcttggcctgtcctgttgtgcctcccttgttccatttcaggtttctcctgaa

SEQ ID NO: 37 - DNA, 121 bp, Bos taurus
aagatcttggcatgctttcaattcctcaaggagataaggaaagaaaaataaacagcactayagaaaaatatgaattagtcctggaaatggcaggtatctctaggccttacatcacattagc

SEQ ID NO: 38 - DNA, 121 bp, Bos taurus
actacttcagccttactcttttagaattgtagtcagaaaagattgtgagtcgtttggaaaygagcacttagcccatttctatcgcacgctggaaactatgaacattttcactgcacgtaca

SEQ ID NO: 39 - DNA, 121 bp, Bos taurus
ctgcttggaaaattcataccaaaagcagtaacaggaaatgtgcagagggttttctgtgtgyccagcacagtgtaagtaagcttaataatccctattttcttaattcattccacacaaagga

SEQ ID NO: 40 - DNA, 121 bp, Bos taurus
caaagaggtctgagtttctgatggcaattcataaagtgacactgaattccaagagtaaatrtctgaaaaaagccagagccatctaaatagaacagcagagagaggaggacagagaaagcag

SEQ ID NO: 41 - DNA, 121 bp, Bos taurus
caggccacctgaattggatctttgcttctctactttttagtagtaactttggtaagttacrtaacctcccagggcctcagatttctcacctgtaaagtgggagtaatgtgcacacctggta

SEQ ID NO: 42 - DNA, 121 bp, Bos taurus
aaatggcttttttacatgaagcaacatgtaccaggacctctattattcactacaaagaaartagtgaataatgctccatgtctcagaattcttgtgtataaaatgagaattatcaaatact

SEQ ID NO: 43 - DNA, 121 bp, Bos taurus
atagggagagagttatactcctgcaaaggactgtttaccccccttcaaaaatgtgcattartcattagctaagtgacagtgggtagatggaaaggtgactttattcagtgatatttttcta

SEQ ID NO: 44 - DNA, 121 bp, Bos taurus
cttatacataaagttcaattttttttatatggtataaaatgccctttaagatctggctcartgtcttcttatcaacctcatttttcacttcccatttttttcagttctgcacacagtccca

SEQ ID NO: 45 - DNA, 235204 bp, Bos taurus
  misc_feature (20401)..(20450): n is a, c, g, or t
  misc_feature (75128)..(75177): n is a, c, g, or t
  unsure (80761)..(80822): sequence is unknown
  misc_feature (80772)..(80821): n is a, c, g, or t
  unsure (132088)..(132139): sequence is unknown
  misc_feature (132089)..(132138): n is a, c, g, or t
  unsure (139288)..(145041): sequence is unknown
  misc_feature (139289)..(145040): n is a, c, g, or t
  unsure (147194)..(147390): sequence is unknown
  misc_feature (147195)..(147389): n is a, c, g, or t
  unsure (169640)..(169701): sequence is unknown
  misc_feature (169651)..(169700): n is a, c, g, or t
  unsure (172768)..(172819): sequence is unknown
  misc_feature (172769)..(172818): n is a, c, g, or t
  unsure (178861)..(179100): sequence is unknown
  misc_feature (178862)..(179099): n is a, c, g, or t
  unsure (183978)..(184029): sequence is unknown
  misc_feature (183979)..(184028): n is a, c, g, or t
  misc_feature (207968)..(208303): n is a, c, g, or t
  unsure (207969)..(208321): sequence is unknown
  unsure (220850)..(220901): sequence is unknown
  misc_feature (220851)..(220900): n is a, c, g, or t
  unsure (224061)..(224244): sequence is unknown
  misc_feature (224062)..(224243): n is a, c, g, or t
  unsure (227962)..(228013): sequence is unknown
  misc_feature (227963)..(228012): n is a, c, g, or t
gtggccagcacctcatgttcgttctctgggtttgctttttcacgtccagtgcctgatcatggccaggttcaccgaactggaggcagatgagatctgacaagttttcatagacatggcatttctgaaggataacagagctagtggtggcaacagtctgaactaaatgtatgagctctggaagctttcagcagccacatctctcaccctgcctccctctatgcagtgcccgtcccttctatcatgctaagaactctccaacgcattcaaagcttttaaccaaagagaagatgagatgtgatcagccagcaggagctcaagctgtccagggaccattcctgcttgtggatgtgccgtgaccccagccccatcctccagtggtgaggaccctcatttggctgcagcttcggtcagtcatttaaggtgacaggttgttgaaaggctacctgtaaacgtaaagctcacatggtccagtctgccaggcctccagggaagccttgttttctggttttcaagtgcaaaaactcaaatctctttattcttaaattcagaatttcttctaaatctgttcaccatcttgcacctctatcatcctgatataaatctgacggtttggttaacttcactgaggcttttattgaccctgcattttctttattgggtcttgatctttcatcacattgatttccatttcacattgatttcaaaactgtctcacatggactgctagagtatgtggtacaaactccctgtctggcggatcatgtgttgtaggaggaacaaatgctgccttcagccatgtattcagtatccaagtatggatgctggaatgcttcatgttccgagtcagcaattccatcttcatcactggaatttggtcctcaccatcatcctcttgcctatggtcgcagagggcttccaagggcttcagcatcctcatcagcatgttctgaattcctttgtaaatttgcctgtggctggggtggaggaggggatgatggagcttcagccctaccgcttcctgtatgagctggtcagtatatgccggggatggacattccactggcatcttagccccaaaccatggcttcccctttgagttgggagggaaggacatctctatgcttcacagtctatcaaaattggggacatttgttttccttacgttattttaatcttttgtccgtaccacacagcatgtgagatcttagttttctgaccagaggtcgaacccaggcccccttcattgacagcacagagtcttaagcactgcaccaccagggaagtccctcctcatattgttgaaaattaaacctaactgtgatgagcgctctcaacgcagagcgctagacagcagatcagatacagattgatccctgctatatgctaagcacagttcaaagcacataacctagactaacaaagttaacctcacaataaccccgtgagtatacatgttactttcaataatttaaaaaactgaaacagaccatacacacaaatggagaaggcaatggcacccactccagtgctcctgcctggaaaatcccatggatggaggcgcctggtgggctgcagtccatggggtcacaaagagtcggacacgactgagagacttcactttcacttttcgctttcatgcactgaagaaggaaatggcaacccactccagtgttcttgcctggagaatcccagggacgggggagcctggtgggctgccgtctatggggtcgcacagagtcggacacgactgaagcgacttagcagcagcaaacacacaaaagcaatccaagtcataaaagtacagtctatgagttatgacaaaatgatgtataattttgtataattatacaaattatgtccagttacccccaagtcaagaaacagtacaggatcctcattttacagatgaagcaactgaggcacagagaggttaagtaacctgcccaggatcacacagctaagggttcagccaagaggtataataataaagccataccacagccacagcgagctgctctgagtcgtcagccccaaccctgccacggggcaggaacatgctcagggccacacagctggtggcaatgaggcaggatttgaaccccagcagtctgaccctaccaaccccccaacccatgcctaaccactgcactctgcagcatcccaaacaaagcaagtggatcccaacttcaccacactgtagctgtgcaacctcagacaggtcctttcaccctccgagccatgaccacatccttccttcctgttttctcaccttatccccctgcgggctgtttgaggctggaactccaggttggatactggccatttagattccaactaggcccacctcaaatccagcctctctaccataggaatctattttgctcaaaacctgacttttagtctgtgcttacactatccatgctggggggctcactaccacccaagcttgctttgctccaagtttgtagctctggggttggaatattctattttaaaatgaacccagtccttcctacctgtcttggttttgcctgtggactgaaccacctcccaggagactgcattaattgtacttgtgacccgaggaatttgtggacaaatttctatgagcctggtttctcctctactcccagctggtagagagcagatctgctcagaacaagagccaagaaggtgcctgccatcatgggacaactagaatggaactctcttctcttcccctgtaagatttgagtctgtaagtctggggcccaaatacacagcccccttgtgtgctctgcaggttgaagcagctggtaatgccagctggccccttcttgaaaaggggtctgatgcgttgcagtagctatcctgctgccttcaaatatttgggaaagccttgctgtcattcagttcagttcagttcagttcagtctctcagtcatgtccaactcttttcaaccccatgaatcacagcacaccaggcctccctgtccatcaccaactcctggagttcactcaaactcatgtccatcgagtcagtgatgccatccagccatctcatcctctgtcgaccccttctcctcctgcccccaatccctcccaacatcagagtcttttccaatgagtcaactcttcgtatgaggtagccaaagtattggagtttcagcctcagcatcagtccttccaaagaacacccaggacagatctccttcagcatggactggttggatctccttgcagtccaagggactctcaagagtcttctccaacaccacagttcaaaagcatcaattcttcggtgctcagctttcttcacagtccaactctcacatccatacatgagtactggaaaaaccatagctttgactagatggacctttgttggcaaagtaatgtctctgcttttgaatatactatctaggttggtcataactttccttccaaagagtaagtgtcttttaatttcatggctgcaatcagcatccgcagtgattttggagccccccaaaataaagtctgacatgtttccactgtttccccatctatttgccatgaagtgatgggaccagatgccatgatcttagttttctgaatgctgagctttaagccaactttttcactctcctctttcactttcatcaagaggctttttagttccttttcactttctgccataagggtagtgtcatctgtgtatctgaagttattgctatttctcctggcaatattgattccagcttgtgcttcttccagcccaatgtttctcatgatgtactgtgcatcatgggatgcagggtatacccttaaataagcagggtgacaatatacagccttgacatactccttttcctatttggaaccagtctgttgttccatgtccagttctaactgttgcttcctgacctgcatacaggtttctcaagatgcaggtcaggtgctctggtattcccatctctttcagaattttccacagtttattgtgatccacacagtcaaaggctttggcatagtcaataaagcagaaatagatgtttttctggaactctcttgctttttccatgatccagcagatgttggcaatttgctgtcattgcctcacagctattccccagcatagagacacctgacattcattgtgggaatctgatgtagttcacagccttttcttatttgcatcttgaggcatacgaatctctgagcattgaggaaaccctgaggttccccagagcatggtggcatggcgcctcatagccattggcctgtaggcattgatcaggcacccaatgtctacacatatttcatcagctgctatcacagatggccttggtcaggctcccctcaactcgcccttgcatgccagcctcagggggtgcttccagagcacggctgtaagagaacactgtcaccatcccctctgacacaggccaggcttctgtaccagcccctgaggtttgtctaagccagcttccatccctgcttcttgccatatagaattgccgtatagaatcatgccaaggcttgattataattcctataatacatgcctaacactccacaaatgctagctgtttctttttccctaacaaaaaaaaacacctctgatcctggctgacgttctttttgtgctttttagtaaagagtaaaacatgcgtccagtctccaggatctggtcacttccccattcttgacctgtttcctgtctggggaacaaggaagtgaagctgggagaaccagccaaccatagtcctgcatcaggctggactggctccagtcacaacagggggcctctgggtgctctgggccatcccatcttaagagggacaacctggaggggttgggaaggtctggggaggaatctggaatccatcttgagcacatctgtttgaggcctggagcagaggaatcttggctagagcagcatcctttagggaccctcatgtgcaagagggcttgcactgaactgtgctcagactacagaaggtcaactttagcttagttaaggggagctctgcccagagtggaaggtgctgcctgggacaccatgagaccccaggtgccagaggtggacgcgcccaaggaggggtgtggatgggctgccctaagaatgacctcatcagagggtgcacgaggcccctcccacccaggaagttgaaggtttttaggtccttcccagcatgaatgtgctttaacagtgattttcaaattgattttaaattcacagaactcttttttacaaatagattcctattctgaaaaacagctcaatgcaatgagggacatggggacccagaaccctgctgctcagcctccccttccataaatcctgagcacagcgtgaaaggccctgcaagtcagggcctgctaaaggctggggcacccccatgtaaatgggcacctttaagaagtgcaccccttgttggtagtttcacttctctgaacacaacaggcccagtttctggcatcctgcctccctccctaatgtcactgtctggtcggaaacagggccttggctgcattctttgggcctgagctggtttcagcccaggctgggtgcctgctcggtggttcttaggcttctgcactcagtcattcattgcacagtgtctcaagtcatcgtattgattcctttagaataaaagccacctcctctttttagacctgagtgctgtgtgtcagacccctgagctgctgtcttcagggcagctgatgctgtttactgttgtccccctagaatgacaaatcacaccagaaaaattgagaaaacagcccaaatggcacagatgcaagcctgcaaaatagacacgggctggcctccgtggtgggagtgcttctgaaaagtgtaaagcaggcttcttgacctgcctcccctcctgtctctgtcaggcagcctcgactcctggaatctgtgtcctctttcctctcgcccttgcctctgccccatcttgggctccatacaattacaccaccatcccccagcttccgggcctcccagcccactccatccccaaccctgcaccagatggggactcccaaaacaggagtctccccagtcagacccgattcacccccaaaagccacctaagacccacccgatcctccatggtactttgtgagttgtctgtgttacaggttctctgtctttattttaccatcttttaagtacctgttattcattctggagaccaaggtcagagtcttatttagctttgcttttctgggccaggctcagaccaggcctttgtaagtattattgagtaaatacacagaatactgcttaaaatagaccctgctctgtcaggctctgagcctaggcttgtattacacatgtgccaaggaattcttggcacagcaggtctgtccctggaccccgcattaaatgccccccacccctactggctcagtggtaaagaatccgcctgccaatacaggagaccctcaatcaatccctggagaaggaaatgacaacccactccagtgttcttgtctgggaaaccccatggacagaggagcctggcagttcatagtccatggggtcgcagaagagtcagacatgactaagcaactaaacaacaaccaccccagatgtagtgatgtgacatgatttctgcagaaccctgacaaaatgagagtccgtaatgtgccccgaacccggtgtgaacttgccccatgacccacagctcagcttccccagtatacttgtcaccaaagggtgtgttcccaacctcttggcaacagaatatttttagcagatacacaggtcagtgccacctggcacttgctcctctttccacagacatcccttcctttctgagcctcacccagagagcaacgagtcactgcaaatgagctggtgggctcactgtggccggacctccggggggccagtgaccgccgggaaccaaccctgagcctcacttcatgggacacaggctgcccgcaaacatgggtcttctcagaggaacagtgagcacatttctggtcgcatctccctctccttttgcatgatcatacccaggctgtgtgcccctgggggaaagcatatttggctacaagatcataatacaatcagaattttgacaagactttaaaatatccaaatctggaggagagttgagaatttttagaataaaatattaacaatatatgaaaacatcaataatatacattcagaacagcctcctcagagctcaaattaggaaggtcacaccaaggtcattgagtttatccccctcattcaagagaaaaatgaagcttggtggaaagagaagtcatgggtttaaaggtcaagacaggtatctactagccacatgaccttggggaatttactttgagccacaagtttagctctgagctaaatctgcctctcctattttgcttgcctgaaactgtttttttttaaagaggagatttttaagtcttaaaatttcatagcaacatgtgaccttagttcaaattctgattctgtgaacctgctgtctgtgacctcaggcaggttactgagcctctctgtgactccattttcttatgtatataggaggatgattaaattccctgtgtcacggggctaccttgtggtttaaatgaggaaaggtatgcaaagcatttaaaatagtgttcggtaccaagtaggagctatctaagggtatgctaatattattattattttaaatctggattggtggttttcttgaaaacccggaagatctgacagcctcatacaacacttggctggaaaggtgtagccactccccctttagagagactgtgccctgccttctagctctcaacctctccctcctccttgtacctcctctgtttcactcagcgggtgtggccagctcaccgctcctccccaacacgctccctcccttctagggccctgagccccctgtttggtcaggaagcagtatttctgtttattggataaatttagaggataaacagggcttccctggtggcttagacagtgacgaatctgcctgtaatgcatatgacccaggtttgatccctgggtcaggaagattccctggagtagggaatggcaacccagtccagtattcttgcccctctgtctctgagctgccataaccactcattctcttgctccagggcctcccggcctggcttctgggtgaacagcactagtggcaggccgctcactacctcacagggcagcttcactgctgagtcttcatcttatgcagggtccaagaacaacagctcacctaccaccttgcctgagatgccatttaatttccactgcatcccctcttctggaatccagagcagagggatatgccatctcctttcagagctgtgcgctgagttcccaagtgcttgggcaaaacttcaggtttcagaaatgcctacaaaaaggctggagtcactacccaaggggtcacgtgctgaatggtcagagtcaggcagctcagcatctccagtggcaggactggaggggaagctgctgaaggcagggggtcagactgcgtcatccgtaagagcactggggtcagagctgggttccggttcctgcttcaccactttcgagctgcctttgtggctttgggcaagacacacaacctctctatttctgtttccttctctgtcagatgaaaataataagactcccgtgatgaagggattgtgcaagattctccttcttttcctttgaatccgtgagtctcagagctgcagcataagaatgaaaacagacccagaagattctggcagctccactcccctcctgggagcctcactcccctcctgacccagggcagtggaacagggaagctgcttccaggcgagggttcgggacccctggtgctgagtagtgacctcaggccctcacagccctgggcctcaggcagtcaagctcaaggtctctctaagacatttcggaatccacagaaacagctttttttttttttttttaagacaaaaccaagcattttccagactggctgacatccctggctcgtcagagcagcaaaagacaggcaggtggtggggctcagacagccgtgagtcagctgtacccaggctaggcacagatagggggccgggagggcacttcctctgcggctgaagggctgcctcagctggagggtggaggggccagcagacctgggaagcaggaccatgcccctgggcgccgcaccatgcatttctggcttccttccctggctctttgcagggcatttctctgcagctgtcaacaccctcagtcccacccagcgctggcagcctttcaggagggctgcagaagagcagtgttcttctctgtctgcagtcctacaggcccctgggcaccccagagaaggaaggtgctaaggaaaccttggtcagcatcacctaaaagcatccaggcagcgtctgtgcaggggcagggggacaaagtggaaaagtcgctggtggtgtgatcttgtccacatcacttgaactccctgggccttggttcacatttgtataaaatgggaacagtggccaagagctggtgggagggctgaatgacctcaagcctgtggcagtgactggtacacctaagggcaaagtttgactgttttcgctggaagggaagtgatttttccaaggttgctcagcacgttcacacaggagccaggactcagatccagctctcatgctgacctctccatgcacagagaggttcctaccagaaagtggggagcgttctggcagccagtccaccgtggttgggagggactggctgtgtgccgcgtccgtggggagcccacagtgtcaggctgaacttgtgctcagggactcgtgagagcatcttggctgagggtctctagcagacatgaggaaagaaggccctggcttggctcccgtctgtccagcaatgcctaccgagcacttgcagggcatcaggcactgtgctaggcccgggggatgcaccagtggatgaggcagacgtgtcccccctccatggggctaacagggaccaccctgtgagaggccacgacagtacacacagctcgacaggtgccgtgaaggaggagtgggtgggacccccaggcccacgggtgtgtgagagagggctctgaaggaagggacccattggcagagccctgaaggagacagacagactgtagcccgcggtggctggcgggggtcgggggagggagtgcagggggaggtggaagaccagaggaaagggactcagaggcacgggatgacattcggtgtggttggcggagaagtgccgtgaagggaagagctggaggggtagctggaccaggaggtgccccggggccttcagcacccgctgagtgaggggcagggctttaccagagcgcagtgggaggagcatttgagtgggcccttgggctgtgaggagcggccagatgggcggtatttggggagagtcccctctggctgtcttgtgaagacagcagggtaggagagaggatggtctgccctgtggccgcccggaggtgggcctccctggaacacatgtcgcatgtggtgttgacgggccgtggtgatggactgaccgacaagactgaaggatgtggaggcaccaaggatgctggcctggccaccaccgggtgtgcatgccatttactgacgcggggacccaggaggcagtggtacaggtggggggcatggaaacaggattctgggaacgtgggttgcaaggtgcctgaagaccaccgggaagacgccaagagggcagctggatgtacagcagagcggtcagagctggagagacaagaggagtcttcagcatccagggggaaagtcaggtgtgtgtggaggagctcacctggaggcaggtgtgaggggagaagcatgcaggttggtacccgcagggagggtgggggtgcagagaaggaacttgccgaggagacccggtcaccaagccagcaggtatctccagatggtaggcaacggggctcacagggtaaaaccactgtcactcagatttagcagcccgtgacattgacaggaacagtcagcaggggagctgggctggggtggcgaggagacgtgactgccagcaggacggccctttccagacttgggctgagaagggaagcagatggagtggtcgctggagccagctgaggtctggcgggcgggggctgctgttgcttggtaccaagaggactgagcccgcgcgcacagtggtgggatgtgtccaaaggtggaggcctgaagctgcaggggaaggggtgggatcttatagggagacccctataaggggccatccaacctccagcacagactggagggactgagcctgggctgggaaggggaggagggcccagccgacaccggacagctgccccacacctgtccctggacttggtcctttgggaaccaccaagctgcacaaccccagtactggcctttgaggagcagagaagtcagaggctccaggctggccaaccagaactgccctctccaagtcctgggagcccaggggccacccttcccctgctctccatcacctgactgcctcctcctctcacctcttttctgtggctccccaatcacattctctcctggttccttatcaggatctctctgcttgggggtggcttttggcaccatccttctacccacccttacctttgggtgcttcctgggccctctcactatcctttttctgttttcatactctcttgagtagtcacctgcctcctcacaaagctgcaagtcccatcctgagtcccatggaattctggttgtgtgtggacattccttcaattctctcatgagcatctcacattcagtagttaaggactagactccggtaccatttctctctaagccgtggctggtaccacctgaactagctaagttgaaatctttgttcctcctgcctggtgccccctgtatcatccagacagccaccaggatttgtagattctacatccagaaggcttcgaatccctgtcgtacaacacgtgtgtcttgaacccagactgtttctcctcttgcagaccgttccccatggcaccaaggaagtatcttctgttgagactttatgtttacctttaagacaactttaaccaagtctccatggcattcaaggctgatggtgatccagtctgccctgcccacaaactctccaggcatcttaacactcatgcctgtgcggctggagtccctgcctggggtcctcccttcttgcctccatctctcagcatcctctctagcctctcccaacccaaggctgtgtcccagcaggctgtgcactttccatgcagtgtgacaaagtggtgtctggggttgtgtacctgccttctcaccccaccccccaagtcacagcaccaccctcgggggatcgagcagagtcctttctctgtgtacctgtgtgtctccacttgggcacccacctgtggtttaaactcgctattgagggagaatgaaggggctgagagtagccaaggtcgacggactgtctgcctgcctccgagctgtcttatgtacagagggaagcacacatgtggtagaaattggagcatctgtaggcctgggtgggaaggggtgaaagacaggggacccataggctccatcatggttggaagtgagaggggagaggctgtcatggaacctctgagcagggcagtgtggaagtggtgtggtgtgtgcgtgcatctgagcgtgagcgctggtgaacactgtgcctctgcctgcctgctccctccctcagagacccctcctgcaggcccatcctggtgacatcctctcagctgtgagctgatggtcccagtggaacaggactgagtcccagccgctgtcacttcctcaccttcccctactccaagtcccctccctgcctctctgaagccccacccagaggctgggtgggagggagatgtacaggtgagtgtgggcataggcaggcctcctgcttggcataggaggcacactctgcaggctgagaaagccacacctctcctaaggcgcctatgccctcggaccctgggtctcacagtcagaaagctcttctcctggaattatgccaggattccctccatgggccctgccgcagccttcccatccctgccaagacactcacacgcacatctacagtgttaggccaatgtggcgttctgacaaggacggtatcgagtgagcttgtgggactcatgggttccttctaagtggaaataagagcattctgattcacggccaagagcgcagtggccctgaggcccaagcaggcaggccaggcaccccaggaggcacccgcaagctgtcggtacttcctgctaggaccccaggtgatccccggagagagacctggtggctggaatctgggtcctgagagcttcccgctcggctcaagacggaaaatactggggagagagcttcaggccccgggtgtcttgactctgaggaccgggaaataaagtgccctccgctctcccgtcacgtgcgcgtctggcgggcctgcgagcggactgtttcggtgctggtcgcccctcgtgggggatggacaggctctggggcaggcagattcagaagttctgtccctttctagctgtgggagcctcgggctctccatggaggttgtgactgaatgtgggcaggtgtccggcagagggtgagcatggctcagtggtggctgccggagctgtggctgtcatctcttttagtctctttgttgcacggtggcccagagcggctgctctttggaagcagaagctggtgctgaggctggatctgggccagagaccctctgtgcccctgtggcttccctcccggcccggagcaccagggcctgttgcctctgagggagaggagggggtgcaccccccgcacccgtctgaggtcagggcaggtgcagagctccaggcggattccccacccctggctgtctctgctccgcgtccccctctccccccgcccctaagagctggatgtggccaggaagcgcgtgcatcttctgaggtgggaacctgcctcctctcctcctgttttgttcctttaccatgacgcctgttgctcataggtacaaatcaaacgaagagtatgtatatgtgcgaggccgcggccgagggaaatatgtttgtgaggagtgtggaattcgctgcaagaagcccagcatgctgaagaaacacatccgcacccacactgacgtccggccctatgtgtgcaagcactgtcactttgcttttaaaaccaaaggtaagagacggtcagcggagcgctggccctgcccgctgcagggagctcccctctgggagctccagcacagagcccgaggcctggacctctctgcctggggcctgagcagccctgatttccgggctccccagttacagagcagcccactgcagacggggcagtggcaccgtcggctgcccagcctgtcctcttagatctcacactggccccgtccaccctccacctatgcgattcccaccacggccaggcagtggcactccagcgcacagctcctggttttgtatttgatctcatcaccctgcttccttttgcatgtctccttagccctttatccaccgacctgatgagttccagcatccacactggtcactgccactcttgagtttggaaatccattccaccctgagccacttaacacacttgcatggtcacttctcatgccagactttgcctccacctcgcctcaccactcagactgtgttcccgctccacccagcttctccacagccctcagcactgggcccggctctcccctcaccttgactggcagccctgtcattctgccctggccacgcagcacctcagggtcagctcaggctctggcagtcacctgtgagaagaaggcagactggccagtgagggtatgaatccagagggctgtgttggatgatgagggcagccatggctgctgcagccacccaggacccaggcgtgaaccagtgaggctgagtctgcgaggcttggacagagtgtttctctatcctcccacgggctgctcctacagggcaggaaaggcatcgtgacccacttcttctttcctggtagccgagtagaccaaggtgcctcagagggaggcctgggctctcagtaaccctggtggcttcagcctcttgtgtttggcagattcctggctcaggatttgggcacgagggtcctgccttccccttcgggcaagttgggggcctccacaacagccccctccagggccacgtggcttttcagtggatgcaacttgagagcaggttcggctttggtgcccattagccttccttttgtgggtatagctgctcccagagagagaggctgggtggctttgaggaggcccctccggactttgagtcttccttcttcctcctcctgatcccttccattctgtcagtgctaggttgggggtcagtttatctcacccccttgctcacggccccctctctgactgggtgctcatctctgatctgctgaccccattagcctgtcctcctctgtcctcggcgccatcattcccaaatggaactcgaacttttccgccaaggttttggttcgaatacaggcgaccatcctccttccttgccctgaccctcttctttcttggtgtctcatcaacaacagtccagagggcccagagaggaccgactggcctgcagcccagccatgtgcaggacagctcgcctagcaggcctaggtcctagtcgtgggctccgtgccccacacacccccttcagccccacttcctctggccttagggggccagttgggactttctggaggagagaggtggagattcaacaattggatagccattgaccaacaattcagataatggtctttgactctgaatgccaaaagctgtttgtccaagccccaccatgaagggaaagaaaatgagtccccccgcccctgcccaagccagaaatgactgttaaagctggagctgtaactatcagctaggacccctgcctctggggcataacccccaccaccttcctctcttccccttgtctggacggactggcaaaatcaggtggcctccagagtggatcactgctggcccaactcccaggctgtccagcggaccacaccattctgttctcagcgtgacgagcccagtcctgagagtgccccctccaccgcacccccacccccacccagcccagggccacacagagctgcctaccatctcggggagccatcatcctctatgtgagactggaaagatccattgagccaagtccccagccagagcagtctcccagagcaatctctattcaattctctctggctttattgagagcaaaggcctggtctttttctgccaagtctgaaagaggtctgggtccctggcaagaacaccccttttccaggagattcctgcattggaagccacatagctgagctatctgcagtcccttcctgggtccccctgagccctggagggtccagagcacacaacctgcatggaatgtcagtgggccctctgagtgcccagggggcggagcctgggatgaaacctgggggtggagccctgaaggccccgcccaggaggatttcctctcaccctgtgatggggcatgtgctgagctctctgccaaggctcctagacccttctgaaagacaaaaaccttccagagccagagcagtgagtgcatctgagatagtggaatctcaaactctgggaggtagaaaggggctagtatgggcggtgacagatggaagcagagccagctcactttggctctctctgcatgaggcaggagagtgagggaagccatgagacactgaagctcccttgactcctcagacccttcagccatcagcccagataccaaaggagctaccctcctctcagggctcctgcctccgtccagctgcctccgtctcctccctccccttgtccttgggctcagactcgccaggctgcatgagaaatgaagctgggcccggtggtcttcagggccctccgtcgccactacctggctgcaccggctagagagccttcctgtccgtctctgtccgcctgtctgtgtctccgtctctgtgtcagacgttgtgacagcagctccggtcctgggtgctagcaccggcttgtctcagtgagtgaggccggggaaggcccactgggatgtccctatggaggtctggggtcctgtgtcctcttctgagaaggttccccgaggccagcagaagggctgtggtgggtacaggcccttgcgccgatcgcctgcggacagagctggcagtttggagcagccctcaggggctgagggagggtggttggtcaaagcccaaagccgaatggggtagacacggttttcagcttatgctcttggtagaggatccacctgtgttccagatgcccatcatttccatccgcttgcctttcctccttcattccaggatggtcagatttggggtgagggggctgggatgatgtgaaaagctgtgaactctgcttggaaagctgaggctctgacccttgacaaggaaatggtgtccaggccaaaaaaagacacctgcagccatttggttcacctccttcaattcacagaggagcaggcaggcatacagaggggacactcagggagggtgctgggtaacactcagggctgcacatccgcccctatgtccccatggcctatcccagcagccactcagactcccagctcctccctgcagcctccggggcaggggcagaggagaagctggtgtccaggggctgcctggtgccctctcctgggattgctgagcccagacagactggtggaggcatttacatctcagccatcatctcagcatctctctctcctccacaaccagtgcgtggctgtggcagagtctcccgggtgctccatgaacactgactgttggggcaggggggacacacagaatgggaaggagggaggttccacgcagtggcatctgctctctgccaggcacgctctgctgccactctacatgcgtttgttcgtccgcttctcccagcatccccatgaggtaggtacaactttacagttgcagaaactggggctcaaaaggttaagacacttgcccaagaacacatagctagcaagcgacagagcccagactcagacccaaggccaccaagctcctacatgtcttggtctgtcccaccagtatggagcacgcaaggcacctgcagtcctgagacctggctccagacggggctctgcgctagctggcaacgtggctttggctgtttggttctccgtgatggtgaacaggagctgtcccagagcatcccgtcacctcagacagtggattatctcgtccagtggcatcattagcaccaaggccaggagtcagaacagaagcaggaagaccctgggcctggtagggggtgggtcacatggtctgggaggttcctcccgacactttacttctgtgatgagaagaacatttcccactcacggttattacgcgcccttagtgtgctcagcacctaacttggttgagtaagagacccaacccttccggacagaacagggccaacaataatgtcatagccaaaatgagcagtgtgcatagtcccctggggtctggggtattcaggggatggcaggctggtctcagaacctcaggggacgtttggtctctctggcctatgtaacactgcagctgccttgaccgccccctgacatcctgctcaggctttgcctactcacaacagtggggccagaggcccatgatgttggacagggacgttgggggtcccccagccctgggatgactctggaagttatggctgtgctccccatttggccaggagtagaagatccagttttctgtccagttaaaggaagaaaatctgagggagagatggagtcacagaccaggatgagcaggagggaaggggcaggaaacagctcctctccatcactgctgcccttgacctgcacacctcaggcagcctcagcttaaggctcctgttacctctgagcaaaaccttaaggttccttaaaattctcagaataattaagaaaaaccctttggttcatgcatgggtgctctctccctagtcacccacccatcctcccgttgatccatgtctcccatcctcgcatcctaagagcttgtcttcctctcgtcttcccatcttcccctctcgtctgcctctccgcctctctcctttgtcctcccaccatccacccttccatcctgcccgtcctttcatccccctctatgtctgccttccctattgggtgtgctgcctccatccccccatccaaccagccctctcccccttgcccagatctccttctctccctttctccatcttctcatctgtttagggatctactccccatctacccttctatttatttttatcctccatctgtctgtgcatctgcttatctgctcatcgagtatcccacccgtctgtctggattctccctcttcatcctgtttgtcactccatatttcctcttacccacttattcatccatccatctatctgtccaccaatcgttctatgcatctgttcctggaatcccttcttctcttttccatccatctgttcaaacctggtaataagatgagtgagacagagttcctgactcaagggccttgtgatgtattatatgaaggaccatggaaatatagccatccctagagcaacagtgagcacatcacagttggaggcgattggtgagcccaaaggaacatcgtgaggcatctggccagcatcctgaggcgagctggggctctcctgctggtccttcgcagagcgctcctgcccatagggctttgtgacctgtgaagcgctgtgcacacgtcaggaagaatcggtgtcacagagtttcccctgattccacagagcttctggctctgctcttcagcccactacggacagagtcagccaccccccgagggctttgtagtcacggggaggacggagcctttgctcagccttccctgtgcccaccacccttggccatgtctgcatggcagtgactttggaggcccaggaaggggacatgactctctaaggaagtcaggacttggaccccagccttgtggcccctaggtccctgtctagcagacttcgctatgccgtctgccctttctccatgtctattaatagcagtaactttgtcctggttcctcctcccaaaccctaagatccctccctgtgggctggcctagcagtatcctcagccagaaggacatcctcagcacccactcccatgctagttcatgggctgggtccctgctctcatcccagcatttgaaatggtcagtaatcctgtcaccagctcctgggcccagggttaaatcagaaaaacttttgcatatgacttgtcttttaatctccttttgtttttttaaccagcatctcacttcctcattataccctctgtccgctcacagcccctcacccaccctacccggctcctctgtacatcgtgcacggcggccgtggctgcacccctgacctgagcacgcgggcagagtgatgtcnnnnnnnnnnnnnnnnnnnnnnnnnnnnnnnnnnnnnnnnnnnnnnnnnntccctcctccccctcccccctgcccaccttcccctccctcccctggcccccttgcccgccctccccctcctttctgtcctccttgcctctgctccccctccccttctccttcctcaccctcttcctcaccctcttctccagtcttcccaaatacaaagagacaaaggctaagttcacggaacgatggcacccacgcccctccttcttacagcacgcgcctggagccagagcacttgagcattgctgactgtcacgcaggtagagcacccggcacccggtgggtgctcagtgaatgtatggtggttacattaatacacgagtattatagtcaacatcgattgagcatccacctgtcaggcatactctagacacgtgccgtggttatcttggcaaaccctcacaatgacgcagtgaggtacatacttttatatgctccacacccacactcacacctccacactctggacatgggcttggtgctcaggtcttttagagctaggggctttcaagagacccaaagccaggcagacctgacagccccctatcacctctcaatcccaccccacgtcccagcaccacaccccagcctcagtcccccagtagcaagagtagagccatattagggccagtttctgtgaacacaaggcagagtggaaggtgagtccaagtcagcatgtctggccgggccctgtcgggcctcagcatccaagaaggaggccagagcagctcttgggggtagataagcaaccagagatattcttctgcagtgagcaaacctttggccagatcccctaaaatcagggtcaagagagtgtgaaaaagcgaggtgtgtgttcctgtgtcttgtttctttctgtttatctgatttgggaatgtatgtgcagtcttaaaaacaagttagatcatatttccttttaggtgaaatgaatcagctttattgaacagaatacactgaactcagagctgtggcctccaaaatgagaatgtggggttactgagttgatcaagaaagcacgtcaagccatttacagatgtcttattaagtcctcataactgtggtagaaactggtgtcactcctttttaaactgaagacatttattaaagctcaaacaggttatggaagttgtctgaggtcaggcaaaaaccactccatgtggctccatgccactccagtgcctggggggctggacaggggagctgcacccaagcccagagccctgcctgggtgggaggcagggtgtgttcactagcaccgcaccaggggtccactgggcaagttcagcttcattttcccagtgaggccgaaaatgatgaccagatgaccttgtttgagaatgcctgaaatcagtgcagtcgttctagaaataattcctgccagcaccagccctattctaagtcctactctaggtactagaggttcttcaatgcatgaaatatagttcctgtcctcaggaagcctgcattctagaggggagccgggtagtgaacaaatgtggaatagggcaagggccttgagtatgaaataaagcatccatgacaggtagggaagtgtggggagtggcctctctgtttaggtgatgtgagccgcgaacatgaggcagggggtcaggaagccacgtggagcctggggaagggctctctctgcaggtggaacagcgggtgcagagcccctgaggacaagagttgggaagtcagagacagctgcggctgtgaaggtcaagggatgggtttagccgcctgctggagcgactgccctgactctgtacgcagaggatggccggtagggggcgcggctggaggcagtgatgcaggctgagcacgtgttggactggggggggcggagggaggtgaagaaacgtgctgttaggttttgctgacacatcagggcgggggcaggtggagggtgaacgcatgagaataaaagatccaaggatggtttccgaggtttatggcctaggaaactggaaggatggagttgccatttcccgtgatgatgaagattcagggaggagcttgtctgttagacgcgaagtggttgggaggtggccaggccggcgccgcagccccgcccctgagggtgaggaggttgagcaccagcgccaccgtgtggccagacctccccagcgccccggcgcgcttcgttccacccgtcccttggctccagagaggcgggactttgtggagattgacagtgaggggtattaggaattattgatcggcaggggcctcccgtagagctctgcaagagcccagatgtggggggcctggcgaaccttgtgctgggcacgggaatcttggattccgtcactcctgagttgggtgcctagggcagggcaccagccctctgtccctcagcgtcttcatctgttacagactttaggatctttcctgccgaatatcaggagccgctgatcctgactccctgactggtagcactacccctctgaccttcaactgcagcatgagatgctggccgtgctgcctgtgtgttgaggttgtggggtacttggggtgagaagagctgaggtttattgggtacttactaggtgtcagaccctcacaatcctctcagcagcttcatgaggtggcttttattattcttacccccacccccaccattttacagacaaggaaactgaacccagagagaaaaagtaaattattcgacattgcacagtaaggaaggggtgggactgagattcaaacccagaccatttcctgcttctcagtgcataaaaacatttttaaactggcagtgtaatgatgtaggggttataaaccttagtcctgactcagccattactttctgggtgaccttggggaaacatttgcctgctctgggcatgggtttccccacaggttgatgagaggtgaggctaggtgaactcctggagctaaagtcttagggcaaagctttagggtatgttttgcctccccctcacgacccctgctctgtggtccccagccccttccgcctctctggtcattctgctcccagctgccaggaggtcatgcccttggcctcccttcacctgacagctccaccccgcagttttttatctacatcctcttgcatgcccgactgtcatccatttgctgagtgctgagctgtttgaaagcacaaatgctgggctttctggtcccggtgcagcttggcatagtggggtccagagaagcatggttgtaccagtgacctgagtcagctcatgtgtccagctctcttagttagtagttgagtggatgctgacatgagcgtagtgttgggccagcaggacccaaaccctcaggatcctgccaggtgggcgagatgttagcggagctctccccagagtcctgattgctgccaacttcagagatgcccaaactaggtctgtgtcctgttagagctgaccccgctggtggggctgccccagcagaagtcagaccaggaggctggtatttcagagctctactctcctccccagctgggagcaccaggggttctacaagcaccttctctggacatgagtggctgggaagaggccctctccgcaggctgaggtcagcttagccaaaccttccaagggaacagggcctgccacctgccagatgctattgtgccaggcatcagcagcgtggccacagtggcaggtgtgtatgtgaactgaccgtgcccagtgctgctggccccgccagcatggctgctgtattccagaataatagatgtctccatgaatgcgctgagtggctacagttattaatatttgagcccttgatatgtgccaggcttgtgtttcctcctcctagcaaaccttatgagatgagactgtcatattcatttgacaaagatggagacagaggcccagcagagtgacttaacttgctcttggtgaagccaggactgaatactaaccaaaaagaaaaagaaagggaaggcctgtcttgtttgctgtggtttgatgccagccttactacttactttgcctgggcaaggtaaggtgaactgtctcatcttagttccctgtctgtaacatgaagataggaatagtgcctaccgggcaggattatttgtggattaggtgaattaacgcacatgcaggccctagagctgaaccttaacatggtagatacgaagtcatttttgctgtttacaaagtgctcccataccctcaacgatcttggccgtcaggcggggtttgtggcacagagcagcgtggggtgcggctgtaacctcgggcctcctgtgtctgtccctcaggaaccagtgatgacccattccaggactcggaagggcgagagggcgcagaggccgtggcagagcaccagttttcagacctggacgactcggactcggactcggacctggacgaagacgaggatgaggacgaggaggagagccaggacgagccatcaggcccgtcctcggaggcgcccccacctggcccgccagccacgctgcccgcagactcctcacccgttcagggccctcagcccacagaggccacccggggcagctcggtctcagaagccgagcgctcggcacccagcagctgctccacatccagccaaagcatcctgtgcctcccccggctggcaccggccccccggggcccagtggagaaggacacaggctcggccctgagctcccaggccctgtccccaaggaggccgtggtccccaagcaaagaagcaggcagccacctaccactcaccccaaaacactcactaaccaaaagctactcgtctccccagcgacattcaccggcccgagagccactggcctcagccccgagtccgcctggctcccagacgggccctctcccctgcgggtccccgagactcgagctgtcgcctcttgccctccaccccctgggaagggaactgccacttcgagcgcgcctgccccccgaacgcaagggcgctgcagacccaggcccccccagacactcgcccaccaggagatggtctccaggccaggccgagtcaccaccacggtcagcgctgccagggaagtgggccttggcagggccgggcagccccttggcggccgagcgtggcccaggctcagggctggccccccgggctctctacccgcccgcgcctctacctcacaagcttctcggcagaagcccagcggagacctgcacctccacatgggtgagttcctgtcccccaagtggctgatgggtggggggccgcgagctcacacctccctgagcgtcacacccagagctggacccctgccagttcagcggttaccaataaggcgtgcattgggcaccacttacacaggcactgtgctgggtgcctgaaaccagtcagctgtgtgtcagaagcagcggagcatggactgtggagctggactaaaagaaagtgaaagtggaagtgttagttgcacagtcatgtccaactctatggactgtagccggccagactcctctgtccatggaattcttcaggcaaaaatactgaaatgggttgccatgcccttctccagaggatcttcccatccctgggatcgaatccaggtcttcagcatcacaggcagattctttaccatctgagccaccagggactacctgatagtttttaaattctggactacccagaattaaatccgggttctgtcacttacgagccgtgtggctttagatgtggtataaacactcatgccatctcctcccaccccatttccacgtattctttgagcagatggcagagcccaacccaaatctccacatctccaacatgactgccaccagcaccctccgagtcacttgagccagctccttcccatcttcccatcagcaccgtcactgtcacatcatcagtgccatctgccatcagtacactccagccaccccataggcttgatcaccgtggtcacaacatcactgccaccaccacggtcacgatccccagcactgacacgttatcatcatcggcttacttttcctctcccaacaccttttctgtcactggagtgtcacgacccaacatctctgctcaccgccagcagtgtcagcaccatcactcaagcgattcaagctccaggagtagtaccatccaggaatcttaacttggtttttaatttggggctcaagttaaaattcctggtggtgaaaaagtgaaagtcgctcagttgtatccgactctttgtgactccatggactgtgtagaattctccaggccagaatactggagtgggtagcctttcccttcaggggatcttcccgacccagggatcgaacccaggtctcccgcattgcaggcggattcttggtggtgggaggaggttaagagcctggggtgggaactcatgttcaagggtaaagttgggtcagtattgtctgaggaacaagagaggcagcagaagcaagagagagggccagcgcacagaagccaacagaaggggcagctccattctctgaaaacgaacgcgctggccagaagcgtggggaccttggttcctgagtgtgcctatggccactatagggctggagatggcccattccagagagggcacccacccagggtgccaccgttggcaagggttgggactcaatggtggcccagctcagctaggacctgctctgtgatctcgccaagccccctcctcactctagtcctcagggtctccaggtgcccagcaggtaaccctcgccttcctctgtcttcttttctgaccctagcagaaggccgagtcgccaagtccgtcctgttcacctgctcccgctcatcctctcttctcccgacccttctcggccccccatgacttccacggccacagcccggcccggacggagaacatcttcagccacctgcctctgcactcccagcgcttgacccgcgccccgtgccccctgattcccatcggcggaatccagatggtgcaggcccggccgggggcccaccctatcctgctccccgggcccagcgcggcctgggtcagcggtttctcggggggcggaagcgacctgacagggtcccgggaggcccaggagcgaggccgctggagccccaccgagagctcgtcagcctccgtgtcccccgtggccaaggtctccaaattcacactctcctcggagctggaggccagggactaccccacggagagggggaggacgagagggggcctgggcagacctcccgactgggagccccgtgcggcccaagtgcccacagagcccacgccgacgcacagcccccgcacccccccagagacctcaccccgggcacccccaggccaccgggcagagtcccggagcccccacctggagtcaccgcgggtgccggccaaccctgcggcctccgccaccccgccgctggaccgcagcagttccgtgggctgcctggccgagaccgctgctcgcttcccagcccggaggaggaacctctctggggaacccaggaccagtcagggctccccccagccctcgggaagtggggggtccgggacacctccacaccagcccgaggagcgggggccccggagcacttagcctctccctgaccacttcagcatctggtttctggtgtttggcaacagacgtttccagccgacttcctcgagtcatcttgctgtcacgggctccctgtcccatctgttgatctttccaagcagcttctgctcagcccccatctgtcttatcttcccacctcgtatgcagttacctgtgcctttttctatgaccttttgttgcttgaaaagaaacaacacacacacagacataaaaaaaaaaaatcccacgaggagactgaggctgtgaatatttagatgggacctcaccctgggccactgcgatcagcagccccccacaaagctggcaagaggcagtcagttgctgaaagaaaggggatgcactgagggagagacagagaaaaaaaaagaaacttttaaaaatatataagtaaatgtaaaagcaagcactcctatgtacagagtttatggttcctatttattgctgcttcatcccaccccagctagtggcctcccctggctgctagcagaagggtcagcggcccaaggcagagggacaggctgggagactccatgggcaggcccagaaaactccaactttccttttccaaagataaggtaaattttcctaggatttcaacacaaactgtttggagcaggtagaaggtagttgctggttgggtccccagggctcgcagacaccctggtggtctgactcgtgaccccattctggcatttgactcatagacaaatccccccaccccggcacctctactctgcactctgccctcaacctttggactggggaaggagccctgaccacccatctcccggttcctgagcacctgacctcggccttgctctcagggccccagccattgctgcgcctttgttctagtaactacccacaaggctgaagggacaaggcctaacccctgggggtcaagatccaaggtgcattgccttgccattcccaaggccaggcttgggcttcatttcacatttggtccctggggtacaaagggctctatttcctccatgactgggcttttccggtacttagcactggaagtttccaaggactcatttctggacctctttgcagcaggaccagtcctcctattggcgtgtcacacactgtcaggcctctactatccccaggaagtacccagaaccatgactggtgggaactgcccaggcctcctattggttggcttaaatctcttttaaaaaataaaattatatatgtgtatatatacatatatatacatacatatatatatatatatatatatatatatatatatatatatatatatatatagaaagagaatggtgtttgatatttcccctagcctcctattgtccgaggtcatttcaattcttctccaaagcaatcaagaataactagtgcctcatttctcatccccatctcctcctttaagaagctgccctgtgttttctggggcaaaagcctgctttgtaaaaaataataataaatagtaataacatgactagaaattaaaatcccaagttgaaatatagaacttgaactctagcatgtttacccagccctgggatatgtggggttttccccaacctccagaaattcttttcttttgtctctaccagggggagaaagcacaaggaccgtggtcacagcccagccaggctaggtgctaatgccgcagagcagggacctccttggccggtcctcattcctcagccaggctgtatgaatcctgtggccagagggggctcctgggctgttgaagttgcttagacaggacaccataaggtgcagagggctacaccatgcagaggcacctctgtgggctcctacccttgggcgtaattccctcttccaccagttcaggacttttccttccttggactctgctgccaggacaaactagccaggccacctggttcatttccctctggctaagacaaaaaggggacaatagggatgggcttccctgggagggggtggctgggccccagggtgctgaggctagggttaaccagcacttcctggctgcctgacccagggtctgaagctcttggtccccctggaagaaggctaacaagcccagccttggctatgctggcacttgtgggtcctggcagaaagctggaaggagccccggaccccagtcacagccttggccagaggctgggtttttcctcacccttgctttccaaccttaccccagggcaaaggtgagggacatgggaaggtggctgcctaaggactggagacttcaagggccgaggcctgggagctgaataaagggcattgcttcagcccaggcttgaaatcttcctgggcaagatcttccagctcccaacctacagagcagcaaacagggggctctgctagagtagcccctgaccttgggggtagccaggcccctcctccaagccctgccccacagctctccccggggcatcattcctctggtactcagacagcccaactactaaggtttccttcctggagccctagtcatggctggtggtggtcagcaggggagagtcaggcacaggcagaggggatgggggccaggagtcaccagagacccatttctcaatgacagacacaatgtgcaagcaatctggccaaaaggttgttgccctgcacaggcatccagagaaatggacttgatgccacccgcctgggctgtatgtcactgggcatggctctcaccctctctgcctcactcaactcctgctcccccaaacacagagctcccagcccgcacgcacacctgcatgataagggaaagactctcacatcacaccctcctcctgccctgctcccagccactttcacatttccagcctgcctgtgacactgttgtccctgttaagggacacagtggagaaagcagtgcccattgttggcacagacacctgtgcctgttctgctgaaatgtgcaggacagtcattcctgggtacaggctggctctggtcctcgggtgttggcagccttgcgggctggagaccaacttgctggggtttcagagccagctcttgtcatggggattccaagccagccggcccccagttctaccctccaggatgcccttcaccctcaggacaagctcagggtcattctgggcactaacctgttcctctccaaggcaccttttacaagcctacttcccctgccccaccacccaccaaggccccgactactaagaccctccaggaagtcaacagcagcgaactgcccactctcccacctccatcacctccaacttccagacccagcagtcccttcacctctctctgtgttaacaagtctgaaagatttaatttctgggtccaggtagcccctgctccatcctcacccaacccttttgaataagaataatcaagataactaagctgaattgctttctagtcctttctccagacaaaacctcttcaaaataaaagtcctgcctggacagtcgtccttggagacagatctgcagcactgaccaaggggagaaagttcccaaagacctgttccaccaattctgctcctgagtcgtgaatcctgtctgctttccatcagaaaactgcttcggcacttatgatcactttactaagcctagtgttaaaaaaggaagagaaaagaaacagaaaaaagaaatgtataggcaaatgtaagataacacgctctctgtaagatagaaatttgccttttttttttttttccctaaaaggtgtatgtattctgtatgtgaaattgtctgtagagagtttctatgttcttaaatggcaatacattccaaaaatcgtactgtagatatgtacagcaaccacactgggatggggtagttttgcctgtaactttatttaaactccagtttctctacttgcatcttgcaatgtcggtatggtatatatatcagtgcaaaaggaaaaaacaaaaactcccacaggtctaaagcacagagtctgatgtacaaaaagaaaatactgctcagtattgatgtgtgacctttgttgtaaattacatctgtactgtgaatgagaagtttttacaagtataataattgcctttattatagctctggctgagtgttcagcctgaggatattttttaaaaaaaaaacagcacgttggaataaatttgaaaatcccaacagaggcctgcttgcccggctcatgatttttcttagggctgtagaatgtcagagctggaaggacactccgagtcccaagtgctttttctgctacagagaaatcagggccagggaaggcgagtggccaggccatagtcacatagcctgggattccaagggcccggcccttccaggcttggcaggaggcacgggtacatggccatgtggtttggggtctgtattcatttcctagggctgctggatcaaatgaacaaactaaatggcttaaaacagcagaaatgtgttctctcacatttctggaggccagaggtctgaaaccaaggttcctggggaggctctgagggaggatctgggccagacctctgtcctcacttctgggggctgcaggccatccttggcctttggtttgtcatcacagcactctcgtctctgcctctgccttcgttctcgctgccttctctgtgtgctgtctaagggtcctcatcactggacttggggaacacgctcattcaatatgatctcatctctagatctttaactgaagtatatctgcgaacactccttttctgaaggaggtcacacttacatgttccagggtttaggacatggacttacctttgaggggccaccactgagcccctcaaggtaagacctggaatctgatcgtgacagttattcactgcctgtgtgacactgcgcaagttacacaacctctctgggcttctgtttcctgttctgtgaagtggagggtttcctgtgaggattaaatgagagagtatatgtgctaagtgctaaatcacttcagtcgtttccgacttggcgacactgtggactgtatagctcaccaggctccaccatccatggggatcccccaggcaagaatactggagtgggttgctatgccgtcctccaggggatctttctgacccagggatcaaacctgcggctcttatgtctctggcattggcaggcaggttctttaccactagcaccacctgggaagcatgcatacagcatggttaacagaaccttgaatatggtacggcgtcaacaagtgtcctctgagcagacctcacacagggtgctgtggttacaaggatgaaaaagtcaggtataggtccccaccttttgtatgcaacaatgacttgctctgcaccaggcagggactaatcatcagatacaacagtgagcaaatcagacagccctgccttcagagaactttcattctaatgggagaggccgtccttaagcaaataacgacatcatcaattcctcagtcccagtggccgtagttgttgctacaggagagaacaaagctctcacacagagtaagtcctaaaactcctgtgggctctggagcctgggtgggttgtggggagggctgcaggtggaggtggagtggaggggaagccatgataggagcagacagaagaagaggtacgtggacaaatcaagagaggccttcggggtaaaatgctggacacaagtttagcactaagaacctaagagggcctgcttgtttcagcggcaggaggatcattgctgacttggggaaaagccggcctgttccagcgcccagtctgcaggcccttcgtaaacactgccagtgctgaatggattgtggaggcagggggtggaggctggagagtgaggagaagagggaagtggggacggcagacccagacatcctccccaggacctgaggggagggcaggggagagctgggcagcagctggagggcagcaaggcgtccagggaagaacggagatgggaatgaggtggtgagaccccagcctgcttcattaggaggagatgtaagtaccagatgcagaaatttcccccagtgtgacccaagggaagaggtgcaagtgataacagtgaccggaagttgagaacatttccgccacggaattttctctgtcacctgctgagaagggaagaggaagctccagtatggggtagggggtgcggagcgggggtggtgtggactaaagacttgagaaagaaaaggttggaaattgtctttgttcattattccagaggcaggacagttgtggatgaaggcagtgtggaccacacaggcgtgggtgctgggcacaagagatgaaaaggctgggaagcgagtatccatggtgccagtgacctgaatgttcatctctgctgaccacagggctggactggaaacccaggctgtgagctaggcttcataatccaggatatgggctgtcacgctgcagaaacaagcaagccagaaactccagaactgaaaacaatgaaagttgaactttcccctctgccatctgtcccatgtgggtcagcagctgaagtgtactcatcctcatcatttggagacctaggctgctggacgctttatcccgtgttcctgtgacctcagaggcagaagaaaggagagagctgtgaaatgttgcattgacagctaaatgctctacatgggaaaagacatctctcctttcaaatttcacctgccaaagcagatcatattgctgtgcctagtgacagagatgaggaatatgtgtgacagtcacacaaggatacgacttcccagtgtcagaaacacccaagggctgagcagatgtcaatgatgggatgggggcagggacagggcctcatggcatcggcctcaaaggtgctgggtttttacagggagtgaaaaaaataatggtgtgcaaggaggcctggaagaaaatggcccctggcattttgatcatggggtgtggaaggcaaggagcagctgtctgggagcgagtccttggggagatcctgaatttcagtcgagaccagtgggaaagtggaatcccaaaaaggcccaggagaagaagagcacagaatggagccaagtccggcctccagcattttacaagccctatttatagtccttgggcttccttggtggctcagtgaaggaagccacctgccaaggcaggagagataggttcaattcctgggtcgggaagaacacttggaataggaaatggcaacccactccagtattcttgcctaggaaatcccatggccagaggagcctggagggctacagtccatggggtctcgaaagagtcagacatgactgactaaaaacaacaatgtatagttcccaacgacaacccagggagatgagacttacggtccccatttttagagaagaaagtggaagttccaaagagcccccaccaaggacttcctgctaagactctgtgctcccaatgcaaggggtttcagatttgacccctgttcagggaactagatctcacacgccccagctgagagtctccacgccacaacgaaagattccacatgtcataactaaagatccgacaagctgcaaagaagatccaggatcctgagcagatcctggaaagatccactttccaagttacaacaaagactcggtgcagccaaatgaatacaaataaagaaagaaagaaatattaaaaacaaaaggacccccaccagccaaagatgcagggctggttagaggctgtgtgagactgactctagcctgactctggtgcagcgcctctgggagccccaagttcctccctctcatctcctccctgtgctctggccccaggggagccctggatctcagactcttcacctccttctccccaggaacccaggggaagaggcaggcccaggccaaggcttcttcccagcagctgcctggcttctcgcagccatccaggatagccccgtgtgtccccgtgtctgaggctgaaggcgcagggatggaccatcagactcaggggctgggattccagtgctcgagagcatgccaagtgcatgcaaactctctgaagaacctgactccccagcctgctgctggcacccaggcccacctgtcactcacaccaagcctcccatggcctctcgtattcacgaggcaatttcccttttggagtgagggagatagggcacctacttccacttcacagaagaatagatcccaagattgcaccctggcaagtggcagggccaccgacccgggtcacacctgacccagaacctcaggaaggcttgggctgagccttgccactgcccatcagggctgggccttctccctaggcctagaccctctctgggcttaagacctagagaccatgcttactcctagagattcccagggacaaaccacggctggcaggatggcctcagaaggcaggccagcctgagatgggcatgagcagggagaaacaggaagcaaaaagagtcaaataaggatgggggcgactgaggagggagcagcccagggctgccctgcgtgggactcatcactgccatctggcccggggagagacttatcacctcgtcactttgtagaggaggaaggctggggcttggacaggtgatgctgctcataaggccacagtggtcaggggcagagcagagacttaaaaccaggcccacacattcagggagtggttgggactatggaaagggaatctgggcctcttggctacctcttagtcctgaaatctgggttgggggaccccagcagacatatcctttaattccatccagcctcagccactttacagagacccagctaccaacctcccccttttataaatgagaaagttgatgtccagagccgggaagagcttggcccaaggccagagctaggattcccgaaccctcagcagagccacctggaccactccgcccacccctccttaccccaggcccaggttcacctgcccagatctgcctttttaggaaaggaaaggagcagccctggtgggggcaggcgggtgggcaggcagccacgctaatccactagctcccggaggctctggttaccgtggtttggggcccgggcaaccctggctgggagtgccagcccagccaatcggtgctgccgctgagctactctgccagagccatacaaggctttgctgcagccctatcttgagccaccacaggacagccccagcgtcggcagccgccccgcccgggagcctgccagcccggcacgtcctcggactctgcctaatccaacctggaagcaggcagggctgcagcgcacgtgcaccgggcccagggttccccaaggccaggaaggtggcactgccagggcagaggccagaatcggggcaaagacctagccgggcatcggagatcctggctggggtcagggatgagctcaggtctggtccaggctgagctgtatctctctgtaagatgctcttctgttcccatcacccctttggcctgactgactgcttatccttccccattcaccgtggagacggggctcagcacagtgagtatctggtcccttctgaggtcttctcagggtccaagtcccaactactctaacccatccagggtctgaggctgcatgcacctctcagaattggggcgtccatttctaagtgcacgttgtgagcatcaggcacatacagccccccctgtggtctttgggggtccactgtcactgccatggatctgggccttggctgtggaagcaggtggggaccggtgacccctgcccagtggagcccatcccatctgtcagtgcataacacctgagtgttatgaattcacaggacccccgaggagtggaaactattggccctgtttggcaagcaaggaaatcaagtcacagagaagttatttgtctgaaactggagtgtcaggattcagccccagagtggtctgactctagatctctagaaatttccgatcctggagggaccaggggctgccatttacactgaagtgtgaatggaggcgagaaagtcattgtctgagataagaggaccctttctttaaaatatgtatctttttattctttcgttgtttttggctgtgttgggtctccgttgctgtgcacaggattcctctggttgtgacgactggggctactcttggttgtggtgcatgggcttctaacagcggcggcttctcttgcggagcacaggctctagagcgcacgagtctcagtagctgtggtgcacgggcccagttgccctgcagcatatagaatcttcctggaccagggattgaacccgtgccccctgcactggcaggcagattgccaaccgctggactatcagggaagtccaagggtgccctttgttcctgaattgggtagggccaggcccccagtgcacggccattgcccaggccctggtcaggttgcccacgcatgcagcggcccctgcagagcgtcccaggccaccactgtcaattagatttgtcacggaagttcactgggttccaacatccttgtgtgtcctacgtgggccaagttgagctcaaagccaagactgcggtactccccagggccacccggcaggtgagagaaacgtgccgacctggggggtggcaggccaggctggcattaggctctgtttgctcacccaagaaaggaagagataaatatagacacaggattactcagacacagcctgggaaaaccggctccgaacctcgacttcagccctggcccggtctcaccttcacccgcctgccccctcggtgtctgctgccaggcctgccccacctgttcccaggacgccccacctgcaaacttcaggacagccgttcctgcctgccttctgggggcaggacagaaactgaggcccagagagagcagggcacccgcctcacatcccacagcaggttaggagctggtgacgcgagggctgcactgcgggagtcagtttatcaggtccaggcaatgcaccagcccagattcggtttccatatttgtgagatggggacctggtacccccggccctcaacgccctggagcctgcgtgtagggtagagttggagaccacgcagcagaaaggggatgaagctggaggctcaagcacaggaaatgctggcccaagccgcatgtgtagggcttcagcactgggactctggagccaaatggcctgggcttaatatccccctccaccattttcagccaagagatttggggcaagtttcttaacatggtgccacaatttcctcatctctaatataagaataataagaattgttattctatacaataaataatatgtacagtattatttgggcttccctgggcggctcaatggtaaagaatccacctgccaatacaggagacatgggttcgattcccgagtcaggaagattacctggagaaggaaatggcaacccacgccagtattcatgtgcttagtcactcagttgtgtctgactctttgcaacccttttgactgtagtccaccaggctcctctgtccatggaaatcgggggcaagcatactggagtgggttgccatttcctcctccaggggatcttcctgacccagggattgtatcacatctcttgtgtttcctgcattggcaggtgggttctttagcactactgagcaaccagggaagcccaaataatactgtctataatactaaaatcccatggacagaggagcctagtggactatagtcgatggagtcgcaaagaattgaacacaagtatgatgttatatatatgtacatgtatatgtgtacgtatatacacgtacatatatgcacatacacataggtattgatacatatatacatgtagacatgtgtgtctacccacatttgggtctcgcaggaggtgctagtggtaaagaatcctcctgtcaatgcaggagacataagagatgcgggttcaggtccctgggtggggaagatcctctggaggaggggatgccaacccactccagtattcttgctggagaatcccatggacaaaggagcctggtgggctatagtccatagggtcataaggagtcaggcatgactgaagtgacttaccatgcatataggcaccggtattcttgggtgggaaatcccatggacagtggagcctggcgagctacagtctatagggtcacaaagagttggaaatgacttagtgactgagcacgcaggcacatatatgtagatgtattatttacatatcattacaataataatagcctaataacaataccaacctctcagagtgttggggtggattaggtgagattagtacaaagcacttacccagggcctgacacagagcaatgactccacatgcatgtttatgatgatgcagccactggggcaggtgggggcctgggcgcaagaggcgtgggtgggcgtctccaagtctcctgccctccaagggaagagctcagccctgagctctatggtgcgttggtctctcctgcactgtgacccttgcagcagctccctgctctgcctgaaagcttcaagagtcaggcagacatggatttgaaggttggctcccacttacgggcttcccttgtggctcagctagtaaagaatttgcctgcaacgtgggagacatgggttcgatccctgggttgggaagaccccctggagaaggaaaaggctacccactccaggattctggcctggggaatttcatagactgtaagagtcggacaaaactgagtgactttcactttgccaccacttacagactgtgtgaccttgggcaagtaactggccctctccaagcctcaaaatccacttttatccctcttgggattggtgtgagggttaaatgggggaacaagtgcgaaactctcagttcagccaggcaagtggactctctatgcttgagctcatcctgagccccatctcttgtttcctccagtttctctcagtggctatgagctgagcccaggacaggtgcatgaccctctgggtgcatgaccctcacacatgcaagggttctcagttatgggaaacactcaccagcccctacatcatgcatgagctcatgttcctgcccttgggtccctggagccatcagagatccgcaagttccccctgtactcttcatgcactcgtgcatatccacacaggctccctctccacattcctgcacacgcacatgcgtgcatctatggacacacagggcacagctgtgtgcgagctcggagaggctggtgcccacaggtgtgtccctgcacacctcaccagcacgcacgctgccacagtcaggggtgttctagccaggcctgccctagccaggcctgcccctgaggtggccgtcttcacagcagaggaatgcagacagctggggatgctctgccagcggacgtgagggagaggcccaggggaaaccacacgggcaggaatccaggcaggcgttccaggccaaggtggagtcctaaggtgtcaggaagtgcggggggggggggcatgtgcagactctaacttgctccagtctcctctctcatcaccctgtgtcctcagcctctaggacttggaggccaaagggttgcacagaccaccgttctccatccaagacagccagccagctctacctgcacagccttgctgcctagcagagcactgggtctctgggctgcagtggcctggtctcagctagaagggatcattcttggcatagggtctttcttcctcactggggaagaatctatgatcacagaagaatctatggggagaatctatggggagaatctatgacccagaagaatctatgactgcagagatcagcagaagaggagtgggttttttttttcctcatttttattaacatatagttggtttacaatgttgtattagttttcctgtatagcaaagtgaatcagcaatatgtatacatatatcccccctttttcggatttccttcccatttaggtcaccacagcacactgagtagagctccctactccctactactaataagtagattctcattcagttcagttcagttcagtcactcagtcatgtctgactctttgcgaccccatggactgcagcatgctaggcctccctgtccatcaccaactcctggagttcactcaaactcatgttcattgagtcagtgataccatccaaccatctaatcctctgtcatccccttctcctcctgccttcaatctttcccaacatcagggtcttttccaacgagtcatttcttcgcatcaggtggccaaagtattggagtctcagcttcaacatcagtccctccaatgaacactcaggactgatctcctttaggatggactggattggatctccttgtagtccaagggactctcaagagtcttctccaacaccacagttcaaaagcatcaattctttggcgctcagccttcttcacagtccaactctcacatccatacctgactactggaaaaaccatagcgttgactagacagacctttgttagcaaagcaatggctctgcttttcaatatgctatctaggttggtcataactttccttccaagaagtaagcatcttttaatttcatggctgccagtcaccatctgcagtgattttggagcccagaagaataaagtctgacagtgtttccactgtttccccatctatttgccatgaactgatgggactggatgccatgatcttagttttctgaatgttgagctttaagccaactttttccactttcctctttcactttcatcgagaggctctttagttcttcttcactttctgccataagggtggcgtcatctgcatatctgatttctcccagcaatcttgattccagcttgtgcttcttccagcccagtgtttctcatgatgtactctgcattagttatctattttatacatagtatcaatagtgtatatacatcaatcccaatctcccaattcatcccccactctttccccttttggtgtccatacatttgttctctacatctgtgtctctatttccgttttatagatgagatcacctacaccattattttcagattccacacatatatgttaatatgcaatatttgtttttctgacttcactctgtatgacagcctctaggcccatactgtcatcattggctcaagtcagagatgacggagacaatgtggaagtcactagaactcttcaggcaggactcatactgactcagcagccagtgtatgttaggtaaggcacttgcatctagcaactccctgagtgcttacaaaagggcctctgctcccatgtacagatggggaatctgaggggcagaggcggcgtcacctacccagatcccctagctggctgactccagacaccagtacgtaaccactgggccatgcggcctctgtcaaagggcacatctcacaccctggaggagaggtttgcaaatgaggctgaaacactgctggcacatgaaagccactgtcccacatgcaggggcagcccagcccaggtggcagagagggctctcccaggtcacagctacatagagatggcagggggaggctgagagccatccaggcttttggcgtcttctggcagcacacatccctggggaccagctgaagctggggaacatgtcagtgttccaagaaatggcaggcacgaaggtgggacatggcctctgcaagttcagccctggggtggagagaggtcattctccatcttcatacagaaaacatggcctaagagggacagagaccaaaaagttccagaagagactgagcagggagaggggctgccagcggagacctgcctccacttcctgaatctctgaggccagggtgacaagtggtggcctcctgtgaaaggcccccgagccaactaggtccctcaccctccagctctagctatttgctgggtggaactgctggggaggagcatgctaggccctggtgctcaggacctcatggatgagggaaggaagaagggagtcagtgcttgaaaaaagtccatctggggaccttccctatactccactggccacactgcctgccccctgcaggttctgtttacagacctggccatttatttacttgctggggagcaaaaatgggaaaatgacagtgctgtcatgggaggacccggaggcaaatgacatgcccaaggccacacagggcagaggattctgacttgtcacaactgctgcttccaggaacacccagatgcgtagccccaaggcgtcacgctacactcaccggggctgccctggggagccgagcctgccctccaactctctggaagaacagggacccaggcacactgcccccggggcagatgactgcacttctctgcgcctctggttcttcaaacagcaatgccttccactcaaggctgttctcatcatccgacggcatcgaacttagatcaaagcatgacctggcacaaaaagcctctcaggcgcctcccctccgcccgaagtttccaaagacttctctaggcctctgcactccttcccaaggcacagctggacttgagacctcgttgtccagcacgagactcaggggaggaaaacaaaccaagaagccagcgtcaccccacttgtcagctggacagacccgcggtccagagaggggcagtgacttgggggaggcacacaagcaggcaggacttctcccataccagcttcatggagagaacaggccttggaccccacgtagtgtccccaggggaccctgggggtctcgctgtggctaagcggcctctcatcccacccaccggccctgcccccaggggttgccgtcctgtgacccacacagggcgctcgggctgccagggccttttagagtcagagccgctgagacttgggaagggggctggcctccctgaggtctcctggggtccccagcagggcagctaagacctgagtccccagcggcacgtggcggcgctgcccgatcggtgatgtcaggcccaccacacccgggccccagcacgttccttctcagagtcggcagagcagagaacaaagcgtcctgcgcattcttgcacgctgactcatcgcctgcacgtagagccacagcagctgctttgcccaaaattggtcgggaggcgggggcgcgccagacatggcagcctggggtcctctgctcactcacctgctccacactctccaggagcccccagtcccaggatttcccaaaacaggcaggaaagcaagaggcactggggggcatgctgttccccaggatagccagggctaccccctgggggagggctcgtgatcaggcacaggtggcaggctggggataaggcgtagatgcaggcactgcttgtctttgagcctcagtttcctcatctgcaaaatggggatgtgccagttaccattttaagcgtttgatatgagttcttttcccatattcttacaccaaccccaaatggaaatactgttatcatcatcatctcacaggtagggaaactaaggcacagacactgatttgcttgaggtcaggtgctagtgggcttccctggtggctcagtggtaaagaatctgcccacagtgtaggagaggcaggagacatgagttcagtttctgagtggggaggatcctctggaggagagcatggcaacccactccagtattcttgcctggagaatccatggacagagcgtctggtgggctacagtccatgggattgcaaagaattggacacgactgagcactcacccaggcacaagtgctagctagctgcagaggtaggatttaaatatgaattgtaaggttccagaatctgcatgtatcccctatatgctaaaatgcggattgaaatatctggtgcccagcaggtgttctcactgtgccctgacccttggtggttgagcctggtccctcacttcacctcactaaacctctaatccctcacctgtaaggtggggtaactgtgaaggatgccctcaagggattgtcagggaaattacactgaaggttcaagtgtgatctgtggaagaaaaggtagatttggttcaacaagccttcaaaccacctttggtcatctaggccaataccaaagtacagagaggagacgagctatgcctggggtcaccagccaggccaagccatactcgtctgggcctccccaggagtctggggaacacggagttgcctgtactctttgggaaagtgagggagcaggaggggccctgccatattccctctgccagcctggcctctcgcccccgacagcctgatttcagagaaggtggagttctttggatctgtcctgtgtcggggtcagaggcttgccctgagtttgtaggaatgaggtggccaccaggtggctttgttctcagctcttacccaggttgcggtgtcccccatctgaggcttgtctgatagtccagagaaagccctagaaggaattcagcacccctaccaccaccagcccccgagccaggcctggtctgggtcccagcgggtctgggccaccacggcacagatgcgcaggactccactctgtgcgctcagtcgctcagttgtgtctgactctgcaaccccatagactatacatagccaatcaggctcctctgtccatagaacttcccaggtaagaatactggagtgggatgccatttcctgctccagggtgtcttcccattccagagatcgaacccacggctcctgaatctcctgcatcaacaggaggattctctaccactgcgccacctgggaagactccactttaagctcaggaggaggtcagctcgggctgggtgtgcacggcctgtgcactggcctccaagctcctttcatccctgggtcctgcacactctttgctccagctcctagcacgtgccatgctcttccaggtctcccagcctttccccatcccatacctcttgcctggaatgccttctccaccttcagagcctcttttggatgcctcttctgctggaaagccatcctgacctttcaggaagaggcaggcactcattcctctggggtcctgtagctctttgtcctccctctttggccaacagaaagactgacacagaacacacactggcccttatcccatagacccccccccccgctgggtccatattccaagaaaaggccttcaagggccctccccccaaatcccaactgggacagagacccacagacccagcccaggtcttgcagagcaggctcagcctgtctactgcatgatggcaaaaggcacagcaaaggcgcctgaactcccatctcttctgctcctggctgtgtggccttgggcaacgcctgtagcttctctgaacttcttcattcccaggccttgccttgcccacttcccaggcccgtttggaagatcaaatgaatgaaggcagagagaatgcttggcgcgtgggcacagctccccacacagctgtcattatcaccgagtcattattacggacctgccttgtgcctggggggggcggtgcctccaaggctgggcagcaggcgggcaggcaggcgatgaactcagaagcagccgcagcctgggctgactcaggctgaggcactgggagaagtgggtgctttatggtcagcctgagccagcccagctctggccctctcctcctacccccaggcgtcacccaaatctgaggccacaaggccttccaggccctttcagggcctcttatctgggaagataaaggccccctccccttgaatggtggatctattcaaatggcttctgtgtgaccttggcaacagtcaccctctctggaccaggcttggggagttccggggtggggggcaggcagtgacctcaaaaggctcccagtgtgtcttccaggtgcttagtggggggactctcccactgctttgggccccagagggatggctcctgttctctccctccctgacactgacctgctgctgctgctaagtcgcttcagtcgtgtccgactctgtgcaaccccatagacggcagaccaccagactccgccatccctgggatcctccaggcaagaacactggagtgggttgccatttccttctccaatgcatgaaagtgaaaagtgaaagggaagtcgctcagtcgtatccaactcttcgcgaccccatggactgcagcccaccaggttcctccgtccatgggattttccaggcaagagtagtggagtggggtgccattgccttctccaggtgatggaactcccagtatcctccctagagtctggagttattatttttatctgacacataagaaaaatgaggcccagagatcaaaagaccctcacctaaggcagcacagtcaacagccaggacacaggcatgtgaccctgccagggtcttcagggcccacctactgcaatcctctattctcctgtggcctcctggctggcgacggctgcctctctctttccctccctggtggctcagagggtaaagaatcggcctgcaacacaggagacctgggttcaagatcccctggagaaggaaatggctactcactccagtattcttgcctggaaaattccatggacagaggagcctggtgagctacaatccatggaattgcaagagttggacatgaatgagctactaacactctttccctacaccctaggacaccagctctatgccaaggcttggacaacagtcaccaacttatgagatcttcacatgaatgtaagacagaggaggaagtcaaagctcagagagctggaattgcttggcctggtcacacagcacagtggtggctggaggctcagtctcccatacctctgctctgtgccctagaacagctgctaccccaggatggtaggggtttgaccaggcctcagggagcctgcagggcagccctctggtttcacagacaccccctggctatgggtgggccaaagaggaagggtacccatcctgccaggatggacctaccaggcccacctgggcccgacgctccttgccaggctcagatggaagcatgaggtcattgggccatccctgctccctgttggctctcgctgctgtgactcagccctgtcttccccaaacctccttctccagggaactctagcaatggtctggcctggccaggtctgctcccgctgcctgtccaccctctcagggcctcccagcctgagtcaccgctcacctcaccacctggcacaatgctcaccgcataaacagactattcccctcccccaggctcccagggttcctctccctacagcccaggagccaggctgaggggtgggggcacttttcctgctgtccccagacttcggccctgaggtccatccccagaacctactttcagggactctctggccttgataggaaaatctagaattgagattgaggcctcagcccagggctcagactgacctgggctcaaatcccagctccttccttgttaggtgggtgaccttgtacaagatacctccatttgaaggagggcaacagtaaaaccagctgcagcccatgaagatttcctacagcatcaccgaggccaggatcctgcttaaaaatgcaggtggctctagattcaaatggtggtatggcctcgcgtaagccactttgcctctctcagcctcagggtccttacctgcaaaatgggaacgagaggaagagagccctcctgctgtggtgactaaatgtgataagacatgaaaaaggtcaagccgtgtctggcacccagggaccaaacacgggtaaacgtttatgtggataaacggtagctgtaattaaatcttaaagtgacgtgtgcataacacatagctcgtgggaagctgccacatagcacagggagctcagctcagtgctctgtggtaacctagacagtgggatggagggggcaggcagagggagatccaaggaagaggggatatatgtatacatatagctgattcatttcactgtatagcagaaactagcataacattgtaaagcaattataccccaattaaaaaaaaaaaaagtgccaggcgttaagtgatcccaggatggttttaatgaatgatggggagatggagagcaatggtctggctcttcactggatgatggagtagcatcagggaacggcttcccaggttggaaagctccagcatcccctctgcaggttgaccaccccacttcccttagtgggtccagaaggctctctcaagagtctttctggctggggctggcctcacagttttccagtttccaggccactcaagaagcacttcactttacagaggacaaagctgatgctcagacaagggaaggggcttgtctgcagccacccagctggaagctgagcccaagcctgcacttccgtgttccccttcttcccagcctgggagctgcctccctggactggggataccctcacctcccagtctcagagagcactctgggagagtctcagagcttgtctgcacactggagactctttatctttgtctctatcttcccccgtaatgctcgagaggcagctccttgggccatggggccagtgaaagaggagaggacccaggagaaaacttctgtgacctcctcatttccagttcaacgggtgatgtgttgagcatgtgatctgaatgagggaacagaggctgggggaggtcgcatacgtaaagggtgaggggatagaaataacactgaccctggggtcaaacagacctgaattcaaaccccaaccattacacgtcaagctctctaacttctcagaatctgaagttgcatctgaaagcagatgccttgagatgcctcaaagggttatgctgcaaagatgaagtgagagcaagagtgtgaccaggctccgtaaatagggatgaaagtgaaagtgaagtcgctcagtcgtgtctgactctttgcgaccccatggactgtagcctaccaggcttctccgtccatgggattctccaggcaagaatactggagtgggttaccatttccttctccaggggatcttcccgacccagggatcgaacccaggtctcccgcattccaggcagatgctttaacctctgagccaccagggaagcccgtaaatagttatagtcagtaataatgatggctaccaccgatggagctcttcctcatttaatccttacacagccatgttactgtgattatacccattttacagatgagcaaactggagctcaaaaaaggaagaaagggcatatgtgatggggaagaaggggtctgacaccagaaccagagaccttagctactagccagccctcagagacataaaataaagcctagccagaggtggttatgggcgtgtgtgctaagttgattcagtcgtgtccgattctttgtgataccatgaactgtagcctgccaggctcctctgtccatgggattctccaggcaagaatactagagtgggttaccatgcccccctccaggggatctcctgacccagggaatcaaacctgcatctctatgtcacctgaattggcaggcaaattctttataccactagtgccatctgcaaaggtggctatggatgagaatattgtgggtgttcagaggtgagttagatctcatgtcttggatggagttgggaaggctggtccatggggtcacaaagaatcacacatgactgagcatgcacgcacgcacctgggggaggcaacctttttgatgggccttgagtttgggcaaaataaatcaagtaagaatggaaggaggaggaaaggcccaccttgcacagaagttgggaggcgagaaagtgtgcagtgtgttcaggaagtgacaagcctctgggaaaaggaaggaaagacaggtccaagtcaggtcccaagcaggccttatgccaggtgggcatttggactgaacaagatgcttcacgctgacaccaggccaggtcctggctccagaagcctggttttcataggaaggcaaattgacccaagtctcaatacccctcatgtctgttgtggcatcaggtactgtgccaaggcaaatgtgggtgagtggagcaagccaggctggccttgggcacctggagggactgtgtgacccagggcagtggaagggatgctcgtggtgcagctggcacatggtgtatagattcacacactttctactacatcccccccaacacacacatgcacacatcactcttttgcaggagtgtgtccacaccaagaggcccacacacaccctgcagcctgaggtgagggagggagagatagcagaggcctgctgaaagaaactcctgtgccaggcaatgggccaaagcgtccacgagctctgccacaaagcctccttgcggctatgaggtaggacttttcttcttaggagtctcggatggatgtgacctctgatactcaggaaaattaaacagtgctatacgcttggtcccaaggttggtgagcagcaaaatgaaagcacagactggctgcccctgccctgagctccgtagggcctgacacagtgctgggcactggggataagtggaggattggagtctgagtcacagggctttgaagctggcagccagagcagcggagcctcagagattccaggggtgggctggcccctgactcacccccacaccctgaggctgccccaggcagtggctttagctcctggccgccctcctgcctgccagagcccagcaaggcctcttctgagtctgtcatggctcaggattcccaggagctgggcgggcagggccaaagcctcaaggcaaggaggtatcctgggcacacctctgctcaggtatgtaggcctagagtcacagtgggaaccccggacctcaccagcctgatgtcagaggcaactaggcacttggggatagctgttaaatgaagaatgaaatactgtatttctgcatggcccagactccgggtggctcaccccttcccagagggaagacagccgcctggtgaggtgctgggtgcgccctggaaagtatgggttctaggcaacacggtgggtgtgactctgcaaaaccaccagctgcgtgtcttggctggtggtagtggagggaggagaaagctggggttccagcccctccaagtgcaggggcctcagagatgagaatccaggcattctggatctccaggatctctggtgggctgttccttctccctgtacctcagtttcctcatctaggtgtaggccaagggactttccctctctggctgcctgtcttttgcttttagaaattatgtccaagccttcatcgttagagcattttgaagatgtaatcaggcagaaaaggggacataagtcttcttcatcttaagcggtgtctctgcaagggcagttttgtctgatgagattaagtcatcttgtatattcactccagccttgggcctggaccatgtgcccaggcctgtgtgctaggccctggggttgggattgcaaagaagactgtgtctcagtgagttcataatttggggggagagacacctctcccccagaaataaccagatatttccaggacagtttaacatgcctttcaaagctctttgacctttccaatatctctaaccacatctgtcatgatggagaatagatgggtgagagattggttgtatagatatatggatggaaggatggataaaatgtcagataatggataaatggatggatcaatagaagggtggatggatggctgtggacatgggaggttgaatggatggatggagggagggatgaatgggtgagtaggtgaatagattgtgggggttgggggtgggaatcattgaatgtgtgatttaggttcctggtcccacagcagatgaatataaggggaaagttccagtcctgcctcttgttcattgtgtgaccctgaagaattcacttctttagctgtagagtgagaatctgtctggaaagacctcacctatcaagtgagagtcatgagcccagcctgcatcccaggtctgttgtgggtatccagtgaaagaggtatggactgcccatgcctacataatggctgtgatgagtcctcagtcagtggcctcacaggcaccggcaacgtgaggtgtttttgctgagggagtgacgcccctctgtggttgctggtgtgttcctaggcttcccacttcctccagcctgcacagagttctctgcccagttaggagcaaaggaggtgacctctgcagaagtgttgctgccagaggctccccatacgctgtacttgtcaaggagtaattgaggtgtcctgtttgttattcatctcagggtaagagtaggctcagcaagggggcacccagggcttgggattagggctttggagttacatagatctgccttccagccttggctctgccacttcctagctgcctgacattggacaaggcatgagcctcagtttccccatttataaaatagtaacaaattatagtacctaccccttaggtaggttatgacaattaataagcataacttatgtaaccacctaacatagagctcagaatatattaaatgcatgtgtatccaagtgcagaattgcgcccttagaactttgaagaaaagtccaaaacttcaagtctagagacctccatcttgaatgctcagtccttggattagtttccttatttcaaaatgttcagtgggactgacattcttcttgacaagtgtgccttgactgaacagtgtctggttttggctgcaattccaggagttccatgggcctcgctgaccctgtcctgattacccttaggttaatagcagactgggcacatgaattatccctttaaaagtggtttgtgtgggagctacaaatctttccaatgggctgagctgtagggaggaggagaatttagaagggggtgtcctcccggggaagccgcaaagaccaggagagctggtcccacaggaccgaggctactcttgcagagacccagtgtggggacgatgccgtgggcggtggcaggccctgctggctcagggtgagctgcagccgatggcaaggggcccagaccacccaccagaaagaggccctgagtctgagtggccctaggcttgagtgggggcagtcctgacctgtagccctgaggacataactcgggaacaggtcattatgggaatgtctaagctccctcagtcccgaaatccccaactcaggctggctccggggccataccctccccagacccccattccttgcagggtccagatatcccccttggccagccccatctgcccatctgctcgctctgctatatgcctgcatggtatgtgcctgcgactgagactctgtgtcccttccattgggactgcaatcaagagagcttcctgaaacctggtggggccaggtgacaacagggaagtggctggttttccagaaagtgaaagagcaaagggttccaggctgggagcaggagtgataacaatgaagtcacagagtctgcagagcttgcattttgggagctggaaactcagggcaggttgattctgcctgtcgtaggctatctgagctgagcaggcccctcacagtcgatgggaagagaggaaagctgtccagggaagccaaggaagggacaggacttgcccaaggccacacagcgtgaatagcaaagctggggacaaagctgcccactgctacaacatcgggtagctgctccagccctttcctgccctgttggacatcatcagaaggatgtttaatcctcgctcctgtacatcctccatcccatgccactggacagctattcgatgggaccaaatttatcattagtacaggggcaatcaaaggagctttggggtccccaggaaggtggcctaggcccatcccaatgtccctgccttcctgccagtgggatccttcctgacagcccttctcaaagggacccagtgcggctcagcttggacccctgggaactacactggtgtgcaggaaagggtgagtctggattagtagcccggagagtgtgtccagcccatcactgtcttgggcaagttgctcctcctcttggacctcagttatctcatctgcccaatgggagtgaaaaccagagagaatttctagaaggcagttcctagcatggtatatttcttcacccaaaaatacaccccaactatcctcttctgccagcccgccctccccacaaatctctgcttcttggattaggctggtgccaagtgtaagtgaagcaaattagtttgtgtgcaaatcaattcctccagcttctgacagggtgatctcctgtgaatccctgtgcctcagtctgcagcctttaccaacccaggcagggagcggggccaggtggggctgaggcagtgcagcagagcagctggtgggggcagtcagtaggaaccagagcaaaggagttgagggcccatgcagccaggtcagccaggaggcatagaggtgactgtcggggcccaggcctagagacctagggtggatattcttgttgttcttgttgtttcttagttgctaagtcatgtccaactcttttgtgaccccatggactgaagcccaccaggctcctccgtccatgggattctccaggtaagaatacaggagtgggttgccatttccttcttcaggagatcttcccaaaccagggatcgaacccacatctcctgcattggcaggcaggttctttaccactgagccatctgtgaagcccacgggccaggaactaaaggaaattcatgtgtgtattggaacagttggcttgtgcagacagaccatgatcatgtcaaaggcaagggaagagggaataaagaaaactgctgtttttaactcggcttgattttctctacctggaaaccaatcttgccagtgaggtggtgctgttcccggaacgctttcagccgctaagaccggggttcgctcaggttcccaggtccggcgtctccatttcacaggagccctgctcgcccggctggagcagcgggcagggaaggagggaaactggagttgggcgcagcctcccaagctgaccctgccaggccgggcggtggcccctgtcctgtcgtcatcctcctttcacagcagagagggatcctgtctcctggtctcgttaattcttctatcatgtttcccagactcggagcctctggttgcctattgtcctgagcaggcattttgcatttatgtaaagattagacaggttagaaccttcgctctcactccgatggtcttttttactttctcaaatccaagttctttccttctcactgcgctctgcttccttattctctctctctccctacctgtctttatcagcctccctgtttattttcttcccttccctgaccccctccttctccccactgacctgcttttcctctgtcctctcttcacagttcagtagtttgaatcctctttctcccccctccaccaccgccaccacaaccctaaccttgcttaattccatatttatcttctcccggagcctcatagaaatgactgaaagcattgctcacctcattccagaaataactcttctaaattcttagagaggcaccgcacgggggagggtgtgagcactggacagggagtcactgtggtttactggagagaacaagacccaggttcctctgtgggctcttgggtacaccagctgtgtgaccgtgacaccgctggcctctggccagtctctgtttcctcccaggcagcagtggagctggcacccagatgagaacagctgtgtgtaaggttgtgaaggagagaggacggtggtgccctgcacacacacttgtgctctgaaatgtttttcctgcttccaccgcagcctgagccagtcggagggaaggaaggggatgctaactggtatctccctccttggttctgctctgctctacagggatcacacatgcgcgcacacacgaacatgccctgggaagaaacaaagctgtttcttcaccgtcatctatttctcccttccaaaatgtctaatggtaaaatcccaactgaacacaggagcaaaaacttgggctttagtgggttcctgaatttctccatttcaaatccaggccttcattcattcaccgccccctccctcggacagcactcactcagagtctcctactgtgtgccagacgggctccagggctggccttctctggagctctggacctcgagattgttggggagataagcccaatgtcatgagtcaggcatgagagagagcacgggttctgggagttccaagaaatgagagggcctttcctcttgtgcctggagacagggtccctgagaaggagggactctgagccagccgaggggcaggagcaggatgctggcccccagggagcccctccatcactctgccttttttgcagaaagtcacagaggtgagccaagacatcctgtcctggccaagatgggaggttttcccaggggcttttggtgtacatatccacaagccacctttctggaaagggctctgagggccccttcttagcatcaaggaaatctgtgggtcacataggttaagaagaaggaaagaagggcacttcctgggggaggtggggaggaggcggctccaggctggtcagtggtcaggggtaaactgtgtccttccctaaggaaagcaggcccagagaaggctctgactctcccaagtccacacagccttgtaggtcatttacctcccacgcagcagaagggacaccctccacctggttgacagtaggcagacaggaaagcagggtctcctccaaggaaagggagggttttgcccatgggacctctccctcccaactctgagctctgggcaagacccatggagagtggggaggggctcacggcatttggaggatgacttgagggggtccagtgggactgaaaggggtccctggggacagcacgggagcctcaggactccaggaggtgctccaggctcagagggagcatcctcccccctttttcctccctcatcctgccctcctccctaccgcagaggctggggcgggccgggcgccctgggaggaggcggtgtccctggctccctgcccaccggtgcagggctggacgggcaggggcggagccatgcctggtgttataagaggcagccagggcaccgaggcaatgagctgtcgctcagcttggcagcaggacgctggcagcaggcacactccgcactccagcccagcctgagcgtgcctcaccactgtggtcgccatgcccaccgccttgtgctccatcgctctagccctgctcgtggccctgcacgaaggtgagcaccccccacgggctcagcagctgcagcagccccgaggctgcttgtctgtatctcctgctggggctctgtgccccccaagccagccgggggccttcaggggcaggagttaggtggcttgggggctgcaggaggctgtgctattagaggtgctgccgtcccaggacagccaccggtccttccaacccagagctgctggggcttccccaggctggcccagggctcctgagcactgagaatgccaacttcctcgattatgcaagaggaggagcccagcgggtcccccatcccagctgtgccaggcgccctgacccacctctccacttttctctccctcctgtgcatgcaggcaagagccaggctgctaccacccccatcccagagcaaccagcgcccttgccccgggcccgaggctcccacctgcggactcgacgttgctcctgcagctcctggctcgacaaggagtgcgtctacttttgccacctggacattatctgggtgaacactcccgggtgagctactggagggatccaagaggggttgcagggggcaggggtggggaatgctggcatgctggggaagccctggcacactgcagctctctcttggagtgtggggctaacaacaatagcaatcagctattgcttcagttctcacgtgggggctgcctgagcaagacagagggctgtctcatgaaaatcctcacaaaaagcctggtcagaaagtgttggctccattttccagatcagggtactgaggctcagagaagttaggtgccttttccaaggtcacacaggaagagtaagtggtaggtaggaggctccagcctaggtctgcagatgccagagcgcacagcggctctgccatgctgcctctgtataatcttccaagaatgatatgattaatgacagcacccatgtcttgactgcgccaggccctatgccaagcactgctggtgcgttatcacctcgtgaacgcacccccatcctccccagtgaagcggggactgctgctgtccccaaatgacagacaagagacctgccccatgtcacctggcagagccggggtggggtcccagagctgtctgttctgtctgcacccgcgctgcctccgggccactgcatacttcaagttgaagtttctctgtgtgtttgtattttttttttccttctccaaattgcaaaagacaagagaagcccggcacgtaagcgtgtgtggagctaatccgcatccaaacactggctcagggcgggaaccctgccagtccctgcgtgctgggtctacctggagtctctgcagctccaaccacaccgtctaaaattagctcaggcatccgaggtgctggtctgaccggccacggggccctgcccttcgcctggcccgtctcagccagacggaatctgaaatcgatctcagccaatctaatatatctatgcacacacacgcacacgtgcaggtcaggcacacgcaccattttaaagtcaaaactctaagaaacacttgggtcacccttccaggcaagtggtgaccggatggaggcagctgagctgtgagcctgagtgttcacttctgtgagagggcactctctccctttcttccagactagttgggggtcttctttgagaacagggggaccagcctgactccatcagttcaaattgctgtctgggagtgagaggggcagggaggacagcttccacccctcccccccatgctgagcgtcttactgagcaggaccagggcagttgggagggaacagaggcccgagagggtaagggtcttgcccgaggctccctggcatgtaaggaggaagctgcagtgggaattcttgagggcaggagctggttacttttgctgccaccctggtggcatggatggctatcccagtgtgcagtgtggacagtcccagcttgccaatggtcctggtttatctaatcctctctctgtctctctccaccctacaccactaccttgctggcggcccgcccacagacagacagctccttacggcctgggaaacccgccaagacgccggcgccgctctctgccaagacgctgtgagtgctacagtgccagggaccccgcctgtgccaccttctgccatcaaaggccctggtaagtgggcacccagcctgcaaggggccagaggtgactgctggcctggacctgctctggagggcagggtgtctggaaggccagcagtggcggactgttagtccctaggtcgtgcccgactgtttgtgaccccacggactgtagcctgccaggctcctctgtctatgggattctccaggcaagaataccggagtgaattgccattcccttctccagggtgtccaggaggccagcagaggcgtggctaaatggtggaggaggggccaggggagcagggtcctgggggtccagaggctgccctgggctgtggggcagcctcccttcctgcagggagccagtcacccttgagtcttcccccctgccactacccccagctctgggggcttctgagaccattgcgtccccactcctgggcaggaggaatcctccccaggtgatagctgaggcagcacaggtccagagaggaaacaggacttgtcctgtcaggctacacagccagttagacgagagctgggccttccgccttagtcgctggggctctgggacctctggaactttctcagtggagaagcagtagctggagttggggggccatggcaccgtccccgagctgccacaaagcgcctttgccagtcttttggccctctggacctccctccctccacgcggagcgttgggaaagcagacagtgacttcaccctcccctacctcccgctctcatgaaggcctatgggaaactcctcccctgagacctcagctgtggctgcagccctgcctcagtttccctgctgagggttctgcttggctgcaagtggccagactctgggaaggccagccaccccactgcctctttctgaggctgagaacgcattcccagtggctcagttttcctcaggccccaccccacctgggaaaagaagggtgccaggtgcacagggtggaaatggatctgctcctgagggcgggtcggggcggggggctgggctgggcctgcagccaggcagcctgggggccctggacagcccctcacttgggccctaatgctgttcactcaggactgatgcggtggcagtcccaggcagcgggtcccctgcagctgcgttccaggatggcaagacacaggccacagcaggagagctcctccagcggctgaggtgaggggcccctacactgattgagtgccttctgtatgccttgcacatttcccttattctccatatgacgccttgggtccttatggggcagccaatagcagctcagacagatgaaggtgtttacccaaggtcacagagcaagctacagcatctggctgactcaatagcctgtgttcttaaccactatgctctttgttaccgccaggcctggaagtggacttttattgagggtttcaaggcttgtgactgtggaaggttcccaggtgttcattcaggctgtgtctgaatcaagcatctcccacatgctggggtccaaacggatgctacccagcctgttccctccctgggtcccagactggactgtctccctggtagctacaacatggctcagctcaaggcttggcatccaggaggtgcccatgaacgtgtgtccaaccaaactgacttgagaacagaaacctatagccagtcatgtggcagggtggctgaaggggcagcatctgagctagaaagtcccagccctgccacgagcaagctttgtgaccttggtctgctcactgaacttctctgtgcttctggttcctgtctgtgaggcagggacaccgctgctatccatctcacgggcttgttgaagtttagagcagttgacatacatgaagagccccaagaaagcccaggccctacgggagctctgaaggttttagccatcccgaacctctgtccctgagggttcctcagggctgcccagggccggggtgcagcctagcccctcaagggtccacatctctgtgaggaggcggaaacataggcaaaaagacaggatggccggctaggcaggacccaggatatactgaggaactatcttaaaaaaataataataaaatgaaagtgttagtcactcagtcgtgtctgactctttgcaaccccatggactatagctcaccagactcctctgtccatggaattctccaggcaagaatactggagtgggtagccattcctttctccagaaaatcttcccaacccagggatcaaacctgggtgccccgcattgcaggcagattctttatcatctgagccactagggaaacccaggaaatgtcttaagatgaaaaacttcaaggtaagactttgcaagtacttggcattccataattagcaaagagtgttttcgccagtctgtactcagcctcacaccagttcaggcctgtgtttattttacagaccaagaagggggttcagagaggttgagacccttgcccaagttcccaaagctgggaaccagcctcccagttcccaggctagaacgccttaagccagagtgaggccacctagatgacggcagagcccctaccagggtctcagccagattcaaaggactgctaggatccatacatatctggagctggaccttgaagaatgggaattttagggcacggagtatggggtgagtggaaggtcaacagcctgaagagccacagggatagaggtgtggaagtgagagggcaatcaggggagagccacggggctactcttggccgtgcagtcaccctggtggcacttgatgttgagcatcaattttgtcaaagctccttgtgggcagaaaagcttctaacctgccccggcctctccttgaggttcagaccttgttttcagggttggctgtgaccaccctctgacctcttggccatgaataaggaatccagaccctatgaccgctgcctctcatggggaactctcaagtgatgtatatctccagagatgctcaattgacctctttccatttcagggttatttctgcaaccaagatccactttgctaggcaacagcagaagccgacgagggagaccagacctacacactccaggcagaggaagagatagctctcgactctgggagaactttgggaaggaagcctgtgtggatacaggaggagaggggcatcccagagctgggagaccttccgacctgtttcctgggccagaaaacccagctgctggagcaggcacaagctctggcctcctcgccctggggagggggcctcgctcaaggcagctccgtgacaccaggaaagtcatcaggccccaggctgcagcgtggcctcccacactggctccagttcctaggccctgctgaaaggaacggcatgcggaatgtgctagcctggaggtgtcctgtctggcggctgtgaaccaggaacaacgtgcagtggcgggcactcacacccaagccagcccgagtccttccagggttgaagtcccggccgcccccgacccctcacccccgctctgtcccctccagccctcgctctccagtgtccttattctcccttcataccctcggggcactcttggtgagaagggcctgcaccacttcacctgtctgtatataacttatttgctctaagaaatttgacgattccgattatttattttaacgtatttttttagactctcaattatttacctgcgaacttgtgtttgtaataaacaacaaaataatgctctagcatttggtcttggttgagcaggaggtgggaggcacttttcaggaaggggctacttagaagtgaagggaacaaagggacggcggggaaagagcctgaggcaggtgtggagcactgagttccacacccctgtgccccggctgggcatcgctggctgctgacccaccctctctggacttttgcctatcatgtgcctagacagccatttgcagctttgatatcccgggttccaggacctgtgtttctatcaggccggtaagtgttggccaggcctttccccagagcatgtttcataggagccaagactataaggacccacttctgctctggttgccacccctgaggttcagagcaaacctgtccagtgagggctgtgtgctgttccaagactgtgtgcagccttactggccagggatggctgttgtaacggagtcacaggctggtccttatccctcaccctgggcttggacagaccccgctgggggcgctcaacacttctctcactaaagaagcccagggctctagcactggcttggctgatcctgccaaggccccaggaagctgctcacctgagtcccagggacagccagaagctacccccgctggcagctcctgagacctacagcctccactgctgccaaatccccctgcgaacaaactgttccctttcccctggccggcctctgctgggaatggtacgctgtggcctgagccagttattgaaaaataattatttacacactactctaagcctgccttgtccatggagccagccccaactccctcctgggagaagaacatgttgacgcatattgaactcctactgtttgctggcattttatgcagataaactcacttcatcctcatgacaatcccatgatatagatacttttattatccccattttacagatgaggaaactaatgcacagagaaggcaactaattttcctggggtctcgcagcaagtaagtggtagcatcaggatttgaacccagagtgtatagtacacatgtctatatgtactgactaaatatttgttgattgaattcatggattaccactgtagtatgacattgaacaaatcttcctctttctgagcctcagttttttaatctataaaatgggaaacagtactttccactttgtagagctggttgtgaaccctaaatggatgagttatggtgctgggctcagtcctgggcctgatgagaggcaaagccgaatgtcaggccgttagaagtgatgatgtaacaagagggacaggcacaaagctgcaggacctaagttggggggagattggggctggctggtgtgcagaggcatggtcagagaaagatgcacgactaaggtgccactcccacagcctaaggagagtgagactcacatcaatagaaggaaagtgaagagggagccccagacagagcagacaggaagggtaaaaggttttggcaatgggagtgacaaaggggtttcccatggaggaccccatgtggctggagcatggtggggagagagcagcaggagaggaaaccaggactccctggaggccaaagtagggagcctgcactttctctcatgggccatggggaccctcgaaaggtctgtgggcagcagggacctggtaaagccagactttgaaaaaatgccagagggccacacagggggaccctgaatggggagacagaaggcagggaagcaagtcaaccgctggtccttagggatccagcctgggtggctggggttggcgatggagccacacagtcacttcctacccaggattccggcacacctctgaaatctcactgagcctaacgccaggtgaatctcactccccagcatcctgttcaaaataaccctgcccccacggaaatcccaaagcaacggccaacagtcaggctaggcagtgatgtggggcaaccccagcatggcaggagtgatcgagaccaggtagaggaatgtaggttgaaggtgtgtccgaggcccagggaattaggcattcactgccctggtcagagttcagagatcagcgaccaaatgattaagtaagagacaattagagggaggcccagaaggcaggtgaaggcaaggcgataccataacccccaggatccttactctcaagaaatgggggcccctggcttgggccctgcactctagccctctgccagccatatctttctctccaaataagaagtttgcagggtgaagggtcatgaatacccaaagtctgagcctgcttctaaaccacattccatgcagcaggggcctcagaagtgtgggggaaggtgggatagagtttggaagaagcagaggaaaatttatgaagaactgttgccaaatcaaactgaaccctgggaagaaaggtgtcaacattttagaaagcatatctggattttatgggacaaaatcgtccctttttcctgcctttttctgccttttccataaatacttacaggtttggtttaggctttctgagttaaacttgtgttccttttaactggaacaccaggcggagataggccagaagggggcacagggtgacccagatttattcgggtcatgtgcatgcatggaagcagagtcagaggggagtggagttccatgtccaggactgtgcagcctgatacatatccaggctacagactggccctttcctgtcctggactgcctctccctccactctctcattcagcaaagaaccccaaggaactagtttcactcttgccatctcactctctctctgaacctcagggatttcaattgagaaaagtcatttgcctatcagggcaatgaatcattggagtgtggccatccatgcgttcaacaattatgaacaatcaccgttcagagactcccgtaaacaaggcagacacagcccctgccctcacaggccaagaggagagcctttcaataaagcactgttactatgaaggtagaagtgaaagcatttattgagtgctcatcaagctcttcttgcacatggattctttggatccttgcagcaaccttacacagcaggttctatcatcgctattcccagttgagagaagagataacggaggttaagcagctcacccaaagtctcatggctagcatgtggctgagctgggatttaaatctcaggctctcagcctgtctgctgtcctgctgctctaagcaggtagatccatacatagtgtgattgagcccctcgggtgggagagtctgggaggcttcctggaggaagtgacagttgatcaagagaaggagcgggtggacagagtgttcaggcagggggaacagtgtgtaggaagggagctatattctctgtgcttagtcattcaatcctatttgggacctcttggtctatagtccgttaggctcctctgtccatgggattctccaggcaagaatactggagtgggtagccatgccctcctccaggggatcttcccaacccagcgattgaacccaggtctcctgcattgcaggtggattctttaccagctgagctacccaggaagcccattctcagaccctatcagggaacaaaagaaggaggcatggggaagactggagaggggttgctagcggggtcgggggggtggtgggcatgcggctacaagcagggaaatccacagctgctgtcacctcacccccaatctgtgacagcctcagacaatgtccccctggacaatattgccatgcctgaaacacacctttggatcaaaccgtgcttgcgccccttggggtttccctaggctggcaaggaagacagacaaggcaaagtgaagagacaggaggtggataggttacgggctgcccttccagctgtgtgcccttcctgtctccctgggatctctgctcatttcatcccaggggcgttgtgggttcacagggaaagcttggggaaggagtagggtttgcacacactgggatgagggaaacagccggagcatagaagaatccgaaaagaggcagcaagcctgattggcaagggccaggctgggaacagcatgcagtgccaggaatttgaacttgagtgacggggagccagcgaaggtggctgatcaggggagagagccaggacaggagctggccttgggcagctggcttgtcctcggctcttcctgcctccccggccagtgcttccagctcaagggggccctcccagcccctcgcaggagagacaaagtgtgggccttgcctccgcctgccagggaccggagccaagagccctcagcagctcggaagggggccatgtgcgggcccgccaggagccctggaagaggaatgtggcctaattaattctccaaagctcagagggcctcgccttgtgggagcagctgccaggacaggcctgccaggacgccacaggcccagcccgtctatcattcagtgctcggggacagcaggctggaagcctggagacaggggcccagggggccagccccttgcctccaggtacacacgtgtcctccagccccttaacagaaaatagtgcgataatagtaataatcgccaacaggccttgagggcttaaaggtgtgtcagactctgtgcaaagcctgttatactcacttctcatctattcattacgaaggaccagtgacagggaaactgttaccatctccattttgcagatgaggaaactgagggacagatgggtgaatttccctggccgaaatcctgcaatcaaaaagcacacgcagggaagctaggattgggatgtaggcagcctgggccccacaagcatgttgtcataagcactgctgagccagcccagcgaggacatggaggcccagggtggagcgatacctttcccggggacagtcgactaaaaacaggccctgggacattgaatagggaagaaagaccacacccctgtcctctgcttgaactgcctcctcctgaagtttctcatagggcttttcctgtctcagcccgtaggtcatcctcaaagacatgtgactcgctactccaggcagatgggctggaagaagacatgccgtctccctgggatccctgctcatttcatcccggtggcgctgtggtggctgcactggcagctgggcgaggtggtctcacagcttcctcctagcccgctttccatccgtccacggaacacatcccctccaaggcgggctctgaatggtgcagggacggctgtaccagggccttccaactagaaagtggcagacccaggagaagatgggcacacagactggcccgaagccaagactctgctcttcctcagcagcagagcaggaggagggcagtgcagccacatcgcatcccctctctgggcctcagtttctcatctgctgtatgggcctaagagcattaactgtatagtcttgtcctgcattcatgcaggctaagttgcttcagtcatgtccgactctgtgcgatcctgtggactgtagctccccaggctcctcaatccatgggattctccaggcaagaatactggagtgggttgccatttccttctccagggggtcttcccagcccggggatggaacacatgtttcttacatcttctgcgttggaaggcaggttctctaccactagggccacctgagaagccccatagtcatgtcctggaactcattcatgtgtcaagtactgtccgaagtagtttacttaatttttaaaaattttccaaagcaaggttttttcatagctttgtaacatatcaccataaggctgcaccatatgcatctgttactctgtaggtgtgtattttagtttgtcccatttccctccaatgcaatgtttacatgtgtgctacatttatacacaaattttatattcattcctaattcttttttgctgcatattttttatggagacataatttacaccccataaaatccactcttttaaagtgtacaattcagggtttttttttaaatatattcacagttatacaaccatcaccactatctaattccagaacgtttccatcatcccaaaaagaaacacctcacctgttagcagttgctccccagatctcacttccccggcctctgtacaccacaaatctactttctgtcactatggatttgcctgttctggacattttatatcaatggaatcataacgtacgtggccttttgtgtactgctccgttcacttagcacaatgtcctcaagatttgtctatgttggagcaggtgtcgatacttcacgcttttccatgactgaataatattcccttatagagacagatcaggcttcccgggtggctcagtggttgagaatccccctgacaatgcaggagatgcaggagatgtgggtttgatccctgggtcgggaaaaacccctggagaaggaaatggcaacccactccagtattcttgtctgggaaatctcatgaacagaggagcctggcaggctacagtccatggggttacaaagagttgaacatgacttacaactgaacacacacacacacacagatcacattttgtttatccatttgtctgcgttgtttccactcttttggcttaagcactttactttagccttcagtgaccctatggggaggtgctctcttttcatcatataaacaacaagactgacatccagagagcttaagtaacccatgcaggtcacttagctagtgagcggcggtggtgggctttgccccaagagtctggctgcagagacagtggcctcaaccactgagcatcactttctcttcagtcagagtaagatagtataaatcagcacccacagcaactgtgccaaaagtggtacccacagggcacttaacagagggtggcttttctcagcagcatttctgacactggcagagccagggtctgccaggcagggcctgaagctggagcaagagtgtctggacagccagtgataatagtgactatctcagtacacgggtggttcttccagcaatggggacatctctccacacttggtggggggccgtgggcactgactcctctgctgcacatctctggcctgcaccccagagcccatctctcctcccacctccacctacaaagtcatggctcccctcctgtccccaaggccctgacactgagtaaccgaggcagcattcttgggtgaggtcaaggtcagagctgcagtggaggctgcatggacccttgaatgggtctctgtctcctcaggcctccacctactaaataattagataagaaatcttaatacttccttttttaattacaaagcaatttaaataggacaatatagacacaaaggcttgtggctttaagataatgaaaagactataggaacatctaaaataaaatgtctcttctgggcctcccactccaaggcaacgactctgagagtggggtaaatagccttttttttttctatgggttcagatatatgttttctatctaacgttttagaggtattaaaaataatgcacggcaacataagtttctctactttacaaccttttcttctcacaccaaaggcatctttccagaccaatacaaggcttttaccacctcttaattttaacagctccacgtggcccttgttaaggacaggcagttgtcacttgactgtccacccactgaagccttttggatggcttgcatttcttgttttcataagcacactacagtaagcacctggtttatacatctttgtctgcagaggacagatttttagacacgaaatttctaggtcaaaggatgagcacattttaagtattctgccgagaatgagattccaatttgcattcttgttcccactgggtatgagtgcccttttcctcacaagccttccagcactgggttttatccatctcttatcgtttgctgccctggtagcaaaaccacttcttcataaggaatacgatgtgcaaaagagctttgcttgatgccacccagggtgaggagggtgaggggtctggagatgctccaatgtctcactctgtcccctggtgcaaagaactcctctagggacttccagcactgctctccaggattctgtttggctctagggctctgtctctcagttccactcaggggttggccctcagggagctaagaatggaggaggggctggccagtcttcctgctcagttggccccagcctcccctaatagatgtgtctttgagtaggcgctcctggggacagcatcatcatgggaaagcgtgtgtgcgtgttgggagcggggggactctgggcacctgaacctgcagatgttcctaatgggggagcctggggcatcctggttccctctcagcctgccatccaaactcacgttttggaaaagactgaatctggatcttgcctctgcccaggtcttgctgtgtagacccaggcaggtcactgtcctttctggactccaggctcccggctgccaggctgggggaatccctttacagggtagatgccgaatctgctccctctggagactccacactggccacaccatgcgcatgagtcacccccaagttggcaggctgagggcaggggaggggcatggaggcaagagaagggaggctcgctccagatgactttggtgccacatggtgagtctggcgcagtggagtcttgcctggctaacgtgagtgtgtgagcacaggcacacagggcacaccgacgtgtgaagtgcattcttgtataccgaccggggatcctcctgctcaagtctgggcattcaggtttacagctcaggtgatgagtgtccatacacaatccatgtgtgtgcacattcttgtgcgtgtcaacacatacacgcatgtgtgcctgagtgcccctgagcttgtaaatcttcacctggttgtggctgcctagatgtgtctgcatgaacgtgtgaaagtgttagttgctcagtcatgtctgactctcctctgtccatgggatttcccaggcaagaatattggagtgggctctctggggcattttcccgacccagggatcgaacccttgtctcctgcattgtaggtggattctttactatctgagccaccagggaagcccagatgtgtgtgcacacatgtgcctaaatccgtgtgcatgcgtgagggtgcaggtgagcctgcaggatgtgcgcacacgtctatgattagagattacgggtgtgtgggtgcacaagtgtcacaaacatacacactaatgtgtgcgtttgtgtctgagcacatgtcaaaacacatgcatagagtatccgtagtgtagatggagtgcgtccacatgtatgggtctagaagggcttcagtgtgcatatgggcacagctatgtatgaactattacagtgtaactctgttgaagtgaatacacatgagtgtacatttgcacccaggaggggccacctcagcgtctgcaaactatgacatctcctccagggcccatcccacctggcctggacctctcccctcaacccacactgaggaaccaacagaaggacagtgtcattgctttaattacaggaagactaagtattttagtaattagtaagtcattataaagcttactgcttttaagaacaaaaatggctatattatagatacaaaatgcatatggaatctgaacaagaagcatggaagtgcaggattttccaccccaatctgggtgggagggcttgaagaccaagtatacacagggctcaggaaggcaagggagggagaggccagagcagagagcccctgcctccatttccaaggctgtccacacctgacctccatccctacctccatccagcgagatatcgttctgggcccagagggccccaaccctggcctgagtggaagtcagggagtgagtgtgtcagaccacctctgacagcaaccagtcaaggcaaggcccttctcattctcccttccgtggcctataactctaagatagtcatacctacctgggttttctcaaagaacctcaaaatataacctccaacacgtgcctacctccttcatcctcccagaacaatttctacctcccacccccagctcctgtccttctctcttggcctgcactgcctccttgccacaggtctgacccacaaacttctactcattggtccaaaaccacgcctgtgtcaccacccagctgtacaattgtcatcccagctggactgtgaactcctgaggtagggaaggctcaggcattcttgggtccccagagcccacctcaacctggcacagcttagatatcactcactatctgattttagaaactgagataagaggagaagaaagggagagcccctgggcgcagcaacgtttggtaaacacggcaggtcgttgggtgccccaagactggatgagtcagcctgacccttgccctggaggaggaagaaaaagtgtcatttatcaggctccacctggtgccagcatcagccacacacttgatccccaccacacacctgagaagtaagcaatatttttactcccattttatagatgcagaaactgaccctcacagaaagtgagtcagcagcagagctgggactcaagccttcctgactcagcacttcctacaggctcatccccccaggttctttctctctgnnnnnnnnnnnnnnnnnnnnnnnnnnnnnnnnnnnnnnnnnnnnnnnnnntcctcaggaacagcccttaatcataaaggattggggtggtgggtagatacgccagctcacttgcaccatgggtggagcaactctaaggctgcttccacaccctctcccggaggtctctggaggggctaagccctgtttccacctgttgctcattaacttgtctgtattggctgcgcttcctttctcccttccacatcttttatggatcttagaaccacctcgaaaataaactccatgccctcgaatcttagtccaggtcctctctggggaccccaacccaagaccaaggggcagcagccacagggactgtgagtctgggaaagccagggggacattcttgcaaagaggcctcggccacagaggcccagagacacatgcaggtccagacccatgggatgagccctggcaggcgggaggccagcctgactgcagctccagagctgcacacagtgtcaggctggcgcatgaggacgcaggagcaccagggtaaagagggcacgggtgtgagcacagcagctgatggcaacggggtttatctcagggcccaagaccacacccacacctccctcccttctgcagaaatgggcctggaacacctgtgccctggcaagccctagggtagaccccggctggaaaaccccagggctcccagctggccttctactgctcagcacctctggcctgggtcctggcagagcagggaggctgcctggggaaggtcttagatggcaaatctgtacaattctgtgcctctctgtccttcccattcaagaaatggcacagggccttggtagggccgaggaagtgaatggagggatcccagcacctcagagggcccctgttctctgactctgccaggacatagtttgcacacagaacattagatgtggcatatcttgcttccccacgcttttcagaagagggtgggcttccctgatggcactagtgttaaagaacctgactgccagtgcaggagatgtaagagatgtgggttcaatccttggatcaggaagatcccctggaggaggacatggcattccggtactcttgcctggagaatcccatgaacagaggagcctggtgggctacaggccatggcatcgcgaagagtcagacacgactgaagtgacttagtatgcacgcacattacttaacccagaggaatcaagttctaacggtggaaattcaagcattggaaaagacatggcttgattttaggagttggccttccctcaaatcacaccatgtcaaatctcagacaggcagcatcatgaagcagaaaaggcacaggctgtagagccagacagacctggctcaaatccttggagacagaaaagcccctcatcctgagctttggcttccttggctgtgaaataagttgacagtgtccactggcgggagacctggcttcagtccctgggttgggaagatcccctggagaaggaaaaggctagccactccagtattctggcctggagaatcccatggactgtatagtccatgaggttgcaaagagttggcactactgagcgactttcgctttcactttcactggccccaggtaagcatcttcaatctccttcagtcctcagtctggtgaggaagtaactccagagatgagcagatgggcactaaggcggccaactcctgctcaggtgggtccagagtgattcagaagcctgctgccccctgccaggggcctctgaggctgggctgtgccctgtccacttcaccctccccctgtgtggcccagccctgacccgagactcacccactgcccggtttcggcacctggcccacagttagccagggctgggtcttcagtatcaacattcctctgggataaatacctttggcctcaggaatgctgggaactgggccaagaggtcaaagggcctggactttatcctgagaagctcttaaagcctcacagcacctagacgaggcaggcgtagcccagtcataaagagaaactgagagccactgatttcatccaagaaaagaaaccaggggcctccttggttatcctccataagaatcaggacagcagaagatgaaaaaaatggactcaaagcaagcaacagactggaaattccacttctgggtatttaccccaaaggagtgcctagatatgttcatctgaagatacatacaaggttgttcacagcagcattgtttataatagtctcatactaagtgaagtaagccacaaacagaaagacaaatatatgattttccttatatggggtataagtgataccccatatatcgcttatacaaatgataaaaatgaacttatttgatgaaaaaaatgatacaaatgaacttctttgcaaaaccgaaacagactcacagagaacaaactatggtcactggagggaggagttggacatcagcatgtacacactgccgtgtttaaaataaataaccaacagggacctggtgtatagcacaaagaattctgctcaatacagtaataacctaaatgagaaaagaatttgagaaagaatagatgtatatatatgggcaactaaatcactttgctttacatttcaaactaacacaacattgttaaataactataggtaggtaggtagatttagttgctaagtggtgaccgaatcttgcctgccaggttcctctgtccatgggattctccaggcaagaatactggagtgggttgccatttccttctccagggatcttcccgacccaagaattgaacctgagtctcctgcactgcagtcagattctttatcaactgtgctatgagggaagaaaactccttaatgtaattaactatagttaacataattagtgagtgaagtgaaaattgctcagtcacgtctgactctttgcaactccgtggactatacagtccatgaaattctccaggcaagaatactggagtgggtagcctttcctttctccaagggatcttcccttaactagaagttaattaactaattagaagtaaatataattaactatactccaatataaaatttaaatatatactagaatgttcatagcagcactgtttataatagtctcaaactggaaactatgcaaaagggcagcaacagtagaatgaataagtaaattgatccctggtggctcagatggtaaagaatctgcctgcaatgcaggagacctggattcaatccttgggtcaggaagatcccctggagaggggaagggcaacaaactccagtatttttgcatggagaattccacagacagaggagcctggtggggtccttggggtcaaaaagagttggatacaactgagcaactaacactttctttcttcagattgaactacaactgataaaatcatacggatgatcttacaaatgaaacaagattccatcctttaagattccgtatgtctatatctatatccatgtatatctatatatctccagttttagtggtgccagaactcagcaaagtgatttcccttgggggaatgagggcaggcagtgactgaaagggaactggaagggagcctttggagaagcagtcatgttccattttttgatatagcttcagggtgcatgggtgttcttgttttgggaaaatccttcaagttgtacatttatgatctgtacacttttctatatgaatactatgctcttgaatcttgtgttggaatcttagcgatatgccctcttctacgtatggcctcttttgtgcaacattgtatttttgacattcatccatgttgtgacatgtaacaagatttcttctttttcactgccatgtagtattctattacccgaatagaccacaatgtgttcatccattctactgttgatggaaggtgggttgtttatggtctaggagctattacaaattagtgctgctttgaccattttttgtacctgagttttgatgaataaatgtacatatttctgctaggggtatacctaggggcgggatggctagctcatagaatatatacatcttcagctaacggcaccccactccagtactcttgcctggaaaatcccatggatggaggagcctggtaggctgcattccatggggttgctaagagtcggacacgactgagcaacttcactttcacttttcactttcatgcattggaggaagaaatggcaacctactccagtgttcttgcctggagaatcccagggacagtggggcctggtgggctgcagtctatggggtcgcacagagtcggacacgactgaagcgacttagcagcagcagtaatgctttggaaggaatggtgctaaagctgaaactccagtattttgggcacttcatgagaagagttgactcattggaaaagactctgatgctgggagagattgggggcaggaggagaaggggacgactgaggatgagatggctggatggcatcaccgactcgatggacgtgagtttgagtgaactcagggagttggtgatggacagggaggcctggtgtgctgcgattcatggggtctcaaagagtcggacacaactgagtgactgaactgaattgaactgaactgaatgattttccaaaatgttttaccattttggacttccatcagctgtgtatggcagcctcatattctcactagcacaagcacaagcatgctttgtcttgtagccattcaggcaggtgtgggataatttgcatttccctgctgcctagtgaagttgagcacctgtcttagtttgggttccctaggtggcgaccctgagacaaggatttgagagcaagaagtttcttggcaggtgtgttcgtctcctaaggctgctataacaaaataccatagactggtgtcaaaacaacagacctttattttctcacagttctgaggctagaagaccaaggtcaaggtgccatccacgttcgtttctggagaggcctctcttcctgccttgcagatggttaccttctcaccgagtcctcacatggttgcttctctgtgcatgtatagagaggcggagcaatatttctggtgtgtctttctcttgccttcaatgtaaggacaccattagggcctcaggcttatgacttggtttaaaccttaattatctccctaaagacctgatcaccaaatacagtcacttgggaaggtagggagacgtgattcagtccatcatagcaggcgatcctaggaaaactcacaagggagtgaagaagtgacagcatgcgggaggaggctctggaagtgcgtgtccacaagccagttgccaccctgggcatctggagttgaatcccacggggagattctgagaaaccacgtaaaccacgccctcgagagttatcccactcagggcgccggggaggtggacttctatacatcgactcctgccggtcactggttgaggcctatttcaaagtatgggggtgtggggtgggggcggtgatgttagctccctggtgcctcccaggctcacagaagccctgaggctcggagctgcgggtacacaggccacagcacgtcctcacatgctagtaacggtcgaatcctcacttgagtgaagtggttactcttttgaagctgagttttgaaggatgtatacagatgggccaggcaggagacagcattccagcagagggaacggtgnnnnnnnnnnnnnnnnnnnnnnnnnnnnnnnnnnnnnnnnnnnnnnnnnnggtcttccagggccccccagtcctctgactctcccaaatcctgactatgtactgcaagcaccactgaatgccagaatgtctcccatagccagagacatagacgaagttcccagcagagaggctgcaagccaggtcggggccggagcaaggacaaagggaccagcgttcccagggcaacagaggctcaggccacaggatgggcatcagagaagtcaaggcagatctcaaggttgacattaacaaaggaccttgagctaaggtatggggtcctgaagccctgagaaaggcccacttatactcacccccatgccacctgagttcagactgtgctgatcctcctcagtgtcctcccaggtccgaaaagctgtgcatgtttacactgtctgcagagcctaaaccaggaaggcagagggtcagggagaggcgggcccagggctgtgggcttggatgagaaccccctaaccaccattttgacctgaggggaactgggaagtgggaacctaagacaggtctgagcaggctctgactgctctgcagagctatcagcttggagtccagccacatccagttctgtatccaaataacaggcatctcatctgcagaagtataacctggcagggcccaggcatcgtgagtatctgtcagtccagccacactttggcaagtcatgtcccccctactaatcctgctctgtgtggcttgggtggggcagtctccccacacccaggcggcgggcttgtgaaccatgcctggccaaccatgtccccacccccaggtgccgtgattgactcaaggataaacccaggaccctacccaggccaacaggagtctcccttgagacttttactagcgatgtctggaaactctctcatctgctgagatcctgagctgtaaagaagagatgggaacagctggtggacagcttgcaagatagagaaaatctgcccagaataaaagaaagaaagaaaaaaaaaaaaaaaaaaaggcaggcctagctggaagatggagagagagagaaagagtctttgtggtgtcaattaaacacctgggtgcagcatgtctgaagttcctggactcctcatttgcatgagccaacacatttcctgctgcgtttatgtttcatcatggtttctgatgcttgcagtctgaaaggatctgatgaaaatactgggtgagaacacaaccagtgttcctttctgcaccttcatatctcagagatgtgcacggagtttctttaaaaagggcctttgcgattggaatgttgcagtgaggccaagatccctgtcatgctgcccttctttgccaaatgacaactaactgactcaaagtggagtaaacactgccaacagcttacattcaagagttcaggatgctactcccactggaagacctgtcctggaaagctgccctctgcctgactccccagagtattctggaaggtgcatttttctgaccaacagtcaggattaattactttttcatttgttgaaatatgggggtcagagttatatagacttaagagagagggaagaaaatagtgcatttttgcaactccagcctgaatgggcaatattgcacgttgcacgacttgatttgtttaattcaatgaagctcgacaatccacccaaatgtgtttaaccataggggtttggttaaataaattataatatatggattaaaaaagaagtaaggtagctctgaaatataccatcataaaaatatgtctcatgtatgaagtgttaagtgcactttgcacaatcacacctcaataaagtgaagttttttcaaaaatcaatttgcccaattatatgtataacatatgcccattaaaaaataatacaacagtcctataacttgcaaaagtttgtcatttatatgattaggtgggggaggtgggcaggaaaggaaggcgaaaacaatttgcaattaaagtaactcactctccttggatgattcagtccatgccagctttagttccctatcagagctatttccccttcacaagctatttcccaagacggaaagaagtataagcttgggaggctatgaactagaaacttgggcgtctaagaactagaagctgggatgtctttaggacttcagggaagagttcctccctggcctcacatctctcttgtaagaatgcctcatcctatgggttcagagtctcagttttcatcccagctgccattacctgtgcagcaggcagagcccagggctgattttaaccttgcaaagactgtagacgctccagaagaggagtgctgatcaggatccctgcagtctggctaggacttggggacattgtgaccctgtccagggtcctgactggcaagtgacacaccagaactcagtggctttctgtgtcccctgaggggctgggaaatcaaggcaaccccttcgcatcacacaggagacaagcgtgagactagagggtaccattcctggtcttctctctgcctgaacactctgtagtggcttgaatgctgacccctcagatgatatgtccacatccgaactcctagaacttgtggatgtgaattggccaaagggtctttgcagatacggggctgccctgatagctcagttggtaaagaatccatctacaatgcgggagatcccggttcaattcctgggtcggaaagatcccctggagatgggataggctacccactccagtatcctgttattcccttgtggctcagctagtaaagaatccgcctgcaatgcaggagacctgggttcgatccctggttgggaagatccttggagaaaggaaaggctgcccactccagtattctggtctggagaattccatggactgtacagtttatggggttgaaaagagtcggacacgactagtgactttcactttctttgcagatataattaaattaggtctcaagatgagatcatcctgaattatctggtggggggaggctctaaacccaatgacaagtggcctttcaagagaaagtccaaggaagatgtgacatagaagagatgagagatgactcagaggagaagaatatgtgaagacagaggcaaagactggagtgatggagccatacaaaatgccaccaactaccagacaccagaagaggcaagtaacaggctgccccctagggccggagcatagccctgccagtactgagatttcagacttctggcctccaaaactgtgaaagaataaatttttaaaccacttgttacggcaacccaagaaactcatgcacatttcctgctctcctttctactctactgtgggtatggaccaaatagccctccagacagcatcctacagagttctagaagtgggcagaagtcccctctggggtttctagcttttctacaaccgctcccaggctggggctcagagagaagggtgaggcacaggcagcctcttggcatcactctttcctcctacgaatctgtttttccagctctctaatggctcctctgagaaatggaagctctgcctacattattccgagctgggcaggcatttcaccctgcactgcaccataaattctttctacccgtgccttacagtaaaactccatgttcagtcctccaagtttgcgcctggcatctgcaggaagtcctgggagcagacaactctgctttctctcttatagtaggtgctgctgattctctacccaccttctctttccctgctccatctctttaaaatgacccagttttcattccggagtccatcttgcccttacatcacccacgtgcttcaggtgaggctaaccccaacctcagctctgggggctgctctaactggtggcatggaatctatcccacgtggtccagaaacccaagcctgagtgccagtgcagggcacctctccggccacagaaacaggcatgcaacaccagccatgatgccaagggaaatatactgggacctgctggaaacaggtatttccttgctgttagaaggatccaccagaagggacatgttctccttttcccttggtgtcctggtggtgaatgtctggcaattctgaggggagccaaccccaggatgaagccatcagacagagcatagccaaggggctgctgagttctaggccagagttgctggattaagccagtcctgaagcccaccctgtctctggaatctggttacctgagccaatacatctcattgttgaagccactgtgtcttagacttactgttacctgcatcccaaagcatcttgccaatataccacttgccacagccagttttttaagactactgtcctgttatgggttttgagatcctattttgggagtcaaaagctaactaagcattgttccttattcctcttacattattattgtagcaatttttaatcctccctaaggcagatggatgcctctggctcaataggaggaaaattcacataaggaagcttgagaaaaaatacacgttactgtatttcaaagaaatgatccacattaccctaacattcacacaaaaaacctgggggaagaacttctaaactgtgagcaggagcagctgaagaggacttgggggatatgtgtctccctttctaggctagtatcactgtaatgtttgaatttctagagtaagcatgtattacacttgtaatttaaaatcctgaggattagagtcatctgaggcatccagaattccccaggtaccgtccatggctcagctgtcaatcctgcagaaagtttatttgtggatcagagcaatgacttaagaagaatagtcacaatgtttctttacaatttagactttttgtttcaacagcgtacactgatctagctgagtgcatgttccccgccacaggaaacccttgccaaatctgtgccaagtggtagttaacaggactttggtgtctcctggggtcaggagaggggctgcagctctgagtcagccacagtctgcctcctcccttccaccccaggatctctggcacaaagcgcccatgcctctgtgaggtctgaagggcctccttgcaaactccaatcctgtgtttatgctcctcctgcaagaaggatgccacctcctccttggacagagatgaggaccttcagtatctccagaggggtctccagactctgggggccagagaccacagcccagaccccagtgccccgagagccccctgctctgccccagggtccccgtcactccctaggggttctcttctcggcttagtcctgatgcaatctccaagctcaactggcctgtctctgtcatttcccccaagctgataaagccagaaacctcagagtgagtggaaagagcctctgccctgaccagaagaaaccgcagggctgaccccataccccacagtaagagctggagaggctgggctctgggctcaacgcctggggagaggaggaagaaagatgaaagagctgaagaaaagaccatttgctatcacccgctcacacctgtccaccactctctcttccctggatctttccctgtgcttggtccctggactctgtccctctctaaagcttctggctccaggatcagaaaaagcctcagtgcgagcctcagttctagaatctcaactctcagaaaggctagtatagggggcctcagcactcccctgcccagacatgcctggggtaggtctgggattccttcatgctcacctcctccattaagggctgggcacccactagaaggcatcctgttccccatgggtatccagaaccctcaaatgtcccaaacctcctcatccaccctcacctctgcctggatgggcagtagataccccaggtctcttgccccagtcagacccctatgcaccaggccctgtgctgggcatcaggttcagagatgaggcaggtccctgctgcaggacagtggggggcaggggacagcaggtgggccaatggccagatgaaagcagtcacagtaactgccagctgctcggcccgatgccagctggggacgtgatattgaatggtcacgagccccttccccaacaagcagttcaagttcccagcagtggtctgtacagaagccctcgccagatgcagcatcgctcagagaggtcctcctggttcgcaggatttaacaagtaacccctgctccacggtcctatcgccctctagcattacgtgctcgatttgctcttccagtcacccactcccatcactggagtgtaagctcttggaggcagtatctgggtcattcttacaccccagaccctgggatgctgtctgggcactcacagtgtatttgtgggtactggatgtgcatgaaaggtggttgctggattcttgtccctccttctaccctatcagtcacctagccaaaccacccccaagacctgcagaagctgtctcttctgttctgtcatctctcctcctcgccctccccagactctaaacccagcctccccagcccttccttggtatttcttaatctctaactgctgctgctgctaagtcgcttcagtcatgcccaactctgtgcaaccccatagatagcagcccaccaggctaccccgtccctgggattctccaggcaagaacactggagtgggttgccatttccttctccaatgcgtgaaagtgaaaagtgaaaataaagtcgctcagttgtgtctgactcatagcgaccccatggactgcagcctaccaggctcctccgtccatgggattttccaggcaagagtaatggagtgggttgccatgctttctccgcctaatctgtaagcccagttcaaacgtcacctcctctgtgaagccagctcagatccctttgtgggcacattgcctgtcacatgatcctactgggcgctgcagccacgtgtttatgtgtctgcggcccccgcccccaccaccacctccactgctgaacagaagatcttcagaactgggctggggcccaggtctctgcgtccagggcttctacagagaccagggctgggcataatatcagagctcaggaacgatctgtcagatgaataaaggagtgagtggagaaatgaatggatgagcccccgttagtgagggatacgtgaaggagcaggcggatgcatgaatgagcaagggaagaagctaccgagtgaatgagtcagtgacttggggtgggggggagggggagtgagcctgtgaaggagagagagccgtgagggtttcagtccgctccagcagccctggcagcagccagcccccgccacccctgggcctgagctccgtgccaaccagacctcccgatgcctcctcccagagccagctgccgtcagcaccgctcagcacgcgctcccgatgctggccagcccctgcgctgggccatgaatcagacagggcactgccccagggctcccaggacccggggcagacagacagcctcataaataaacccgatgccctgctgggcagacatgtgttccagcagtgcagtgagctcagggttggctctggagccggggctggcagggcagagcctgatggagaagcctgggagagcctcaggaagagggacctcagggctgggcctggaggagaaagggcacccggggcaggagggctggcagcagccaaggcacagtggcttcgacagacacaggagtgcagggggagggcgtggtggaggtgggaacatggggaacgcagggcctgagtggtggggtcaagaagttgggattggcagagccagggctggggacacagcaggatgtaagcagagtggggcacaaggactgcgggctggcggtgctgtatctcagaaggaaagatgggaggctatggggaacaggtctgtgagtttctagggcgctcagggctgtgtcctgctatagctgttgcataattgagcttctggcttctctccacaaagtcaccatcatcctcccagccctaatactcaccaccagcagcttgaggctttggagcacccaaattagggaggttactttggtgagaacacttccaagtgggtgtttttaagccaagattgttttataatggttcagatcatggggaagatcctggggtttctgaagcaaatcagggaatttcagaatttgacaggaaacctcccagttgaatgggtggaggccaccaattcaaagatgctgagcatcctacagtgcacaggacagcccttcacgacaaagaatgacctagtctaagagatcaatcgtgccatggtgttcaactctttgcaaccccatggactgtaaccctccaggctcctctgtccatgggattctccaaggaagacgactggagcgggttgccattcccttctccagaggatcttcccaactcagggatcaaaccgggtctcctgcatcacaggcagattttttacctctgagccattgggaaagcccagtgtcgaggttaagcaacctgctttcacaggtgggaggactaagacggtgaggatgctagaccaaaaggtggtctccagtaattcacgtgggtcttcatacgtgccaggagctgttctgagaacctacccccattcactcatgtcatctcttcctgctttgaggatgaagattaaagacatatgtgattttcccagggtcacacagctggtgggtggtgaaggcaggattcccacccggattgtctggcttcaaatgctgtgctcttgatcatgacatcccatggtctcccacatcacccagcagctgggacagagctgggcttgggcccagagcccccctctccaggcagatgttccttccactctgctctgggccccaggtccatgtaggagtcttgggctcctccaccaccacagacgtggagcttagcaaccgggactttgatttgtgagggatgcagtgggtgggcaggaggcagatcccagggacagagggcctttgtctgcctgcagatgggcaggggccagttgggtgcaaactcattagacagctgccgaggctgccaaggagacgggagcaattagcgggcttggctgaagccaggaagtggaagccgctctgtgagagctgctgagcctccctgccctccaccaggacccagctccctaggaggcagctgccaagtttatgttcagtttgataatggcagctccaaccatccttacaggttgaacctactatgtgctgggctaggcacattccatatcttgtcttttttcatctataatcacccccacccaccttgggaggctggaatgactaactccattgcatccacttagtcatccttccattcattcgacaggtattcatttattgggtgcctactatgtgccagctctgtgctaggtcccagagatgcagcagccaacacagcagacaaaagtctccactccagtggaccttctgttctggaaggggaagacaggcaacaacaaaaaagaaacaaacaaggtaactgcaacttgtgatcagggctatggaggaagtgaaggggctgatgggaggatgctggggataaaggaatcagggaagctctctctaaggaggtgacagttcacaggggagggacttgggctccgagaggaaaggtgacttttccaaggtcacacagctggaaggtggaggagctagggcttgcctccagccttgacctgggcacctgcctcacaggagcccctgcccctccaccaggccaccatccacagctgtgccacacactggcaccgtatctccaccccttcctcatggcagcctcatgaaattcgtggggttatcacctccatcttacaggtggagaagaggcccagagggggccttcacaaacccagggccctgcaaaggaatgacagacaaggggcttgagcgtcttttgatccccaaacctgtattccttctgccacacctccatccttcctggccaagcacttgacgcgcactgagcgtttagtaggccgataagaaacagatggatgcatggactatggggccttgggcatcatctcctttcagtgcttccatttctccattagagaaggcgagagggtccagaccagcttcaaaatgcccaagttcattctactctgttgacattccttgaggagcgtggtcccctatggagaaaaagatgaaagggactctgcctcccgcagactattctgggcggagcaaactgcaggcagaagcatggaggtgggaaaggaaatggcgaggagtcagcagacatgtttaggacgcggagagccacctggaactcatatctaagtgtccctttccttttcctgcattcttaccacctgtcacctgcatagggtcttaggccaccagagcttcatctcctctcaattccagctcttgcttgagtcccagagagtctcccagaggaggggctgaagcagatcccaaatatatctgtgccaccaactgtgcacagtgtgatcttggtcaggcagctggtcccctccctcagccttggtcttcctatcgattaactggggagacagtgatcagagcaagtcggtagcacaataaaaggtgaggtttatgagcacattctccatgtcaggcagtcatcccttgagacaggcaattttgttatccctgatgtacagataagagatctgaggcttagggaggtgaagtcactggcccagggccacacactaggaaatggctcccccgggggattcacgcccaggtccatctgatgccagagctctgctcataacaaaaagctcatatgaagcaatgccctgccctttgacccacgcaacactcaacccccaggactttactcgtaggaaataatccaagagagccaaaaacctgttcacagcgggcctatttacagtatggcagatcactggaagaaatctgcatgcccaacgacagggctctgttcactttagaaattaggcagcttcagatggactgtggcttactgagcaccagctcttgccagttgctccactgtaacccccaccctaaccctgcaaagtggatgttgctttctgcatcctgggtgaggcctccaagttcagagtgtgaaggattggctgagggctcacagccagtgttgggccagggcatgagtggtgtggccaggcctgttcacagccacaccccaggtagctctgttctacaagaaaggaagctaaggcaagtaagtgacccagtaccacacggctgataagcagagaactggagtttgaccacaggaactgggactgcatactctgggaccacttccccacactgccacctactgactgggaaactgcaggcgagtcatttaccattcccaagcctcctgggctcctcatctgtaaaatgagaataagattgtctgttgcgcatggtgtcaccatgtaagcagtggtaaagatagcaatggcaacactggtaatactgctattcacagtcgataccaccgggacagcgttctgccgtgaaaggaaaccttgcctgaacgttagaaggactggctgcaaacctcagctaggacacgtctcaactctctctgggcctcagtttctccatctgtaaaatgggggagggcacacttgagcatgtctccggctctggtggtctctgagcccaggaacactgctatctcgggttttccctgggactctgcctgctgacccctcatcacacactggtctgggggagcgggggcgggacgcagtgggtctgggcttgaggacacatgtactggaggaggacaaggggcccttggacagggaaatggaggttaagtcaggaagccccaacactcagcccctcaacacacagcccctgctcctggcctaagggccactcaggcagcatctgctctaggtcctttgtacctctgcatgggacctgcctctgccccacggcctcagtctctcccctccctgccagcccctcaaggagatgctgaaccttggtgaagagaaagcagaggaaggcaaggaaggaaaggctgaggggaccaggagaagaggagaaagcaccctgagaaggaggggtgaagagcatggttttacataatggatggtaggggtgggatgagaacgaggcttgggacggggtagggaggaagaagaagaggtcaacagaggggctgagagggtctctgacatttttcagagttccctttaccaaccctggtgaccttcgggtgccctctctttatgtcctgctgactggatacactgggagccaggcctttcacagaggtcatgccagccctgagggcaggcctcccacatggctccagccccataggcggccacacagaagggccaagggatgtttgcgggacaaaggacttggttcactctcccaaaggctctgaactgagaagaatgtagacatcatccaatccacctttcctcacctgccgccccaccccacccccaccaagggaggaaggactttctcagggctccaaggtggggatgtcgatgtcagggccagaaccggaacccagtgtcctgtgtcttgggcctttctccagcccagccctggagggtcccagcagcaggaagaatccctgcctctggttctggcttaataaccagccacgaggcggggctcagggcctgcggctcagctgccagtctccccaggttgcaagagcattaaatggcctcagtgatgcacagctttgactcctgagcaggcgaggctggtggcagagaatacactgatgtgacatctgggggctcctgggagcctgagccccggacaaacctccaccagcgtctgaggaacctcaggctctgcagagtcagtggcacagaggcccgcagcatccttggaattgaggcctggtgtggcagaaagaggagaggccagatgacccaccgagataccccagaggcagcaaagctgagagacacagccagctgcaggttaagagctttcaaaaactttcagctacagccaaagacaggagatcagtttgtaaacagacaacaaaatcccacaacaccctcagatatgtcctaactcatctctctgatgggctcagagctggagctggcctgctcagattcctcatccctttccaagaaaggggcagcctagccttggacttggagaggccaatgccttcctcaggccagttcttctattccctccccatccaaatgcatcaacaaatcccctctgggtttattttcttccctccttccctgcaggactccagcctcatcccatcagtggtgctcacccttcctcccaaaccctccctggctccccatgtcaacaaggtggcattcagactacttgacttgacattcaagtgtgatctgctctctgacctcaaaccctactgctcccctctgccccaaccatgactctcagtcttgggatgttcttgccacaggaactgcacattccaatctggtagtgggcatgcttttcctctgaatgcaggtgacccatgcgtctgccccaatcagtggggccatggtagaggggactctcaaccctaccacttcctggaagtgtgaccttggggaagggagtctcacttttctcatctgcaaaatgggaatgctgatcccttcacgggattcaaaggtctgggcacagtgcagatcacagaactattattagctattatttagctattattggattccctgatagctcagttgataaagaatccacctgcaatgcaggagaccccagtacaattcctggatcaggaagatctgctggagaagggataagctacccactccagtattcttgggcttcccttatgactcagctggtaaagaatcctcctgcaacgcgggagacctgggtttgatccctagttgggaagatcccctggaaaaggctacccactccagtattctggcctggagaattccacggactgtatagtccatgggtcgcaaagagtcagacatgactgagcgactttcactttcactttagctattatttatcaggatcagtgctgttattacttcgtgcggtcccacacagcaaacatcctaagcaccgggccactggcaggccccaagtctgtcaaactaacctcacatgataatattagaaacactcgcctccatctcaacttgcatatgtgaaactgaggcccaggggcccaaagcccagctaacagcagaacagaccagaagccacatctcctgatttccaagccagaactctttccctacaagctgccactactaaaagccgagttcagacgccaaactttaattgtgatagtctcagtttatacaagaagaaaaacctttgctccatataagaatctttattatttattctcacttttaatgccccaccttgaacattcctatgtaccttcagagaacacccccctcctcctcctcctaggcaaagctcactcctccagctgctctttctccccacctcttttctctctccatccctggggaagcctttatctgaccttccctggcggagccaaagggcaaatgctggcttgcctttttgctgctcagctaaaaagctgactgccttttctcactttctggattgtgttgttgttcttagcctcaagggtctaccctgtaagagaaaaccagaacctccctctccaaagcctttatctattcccagttcctcccatcttaaaaaacaaccagggaccagacaaagcaaaccttcttctaccctcttctccttcagtctggcccggtttcttggtggtgacctgttatctccaggctccatctccttggcttcatctcctactcgccaacccatggggttgcctctgctgtgtcttctgttcaggtctgcagcgactccatttcccccaggtgtgctgggctctgggtagccttcaatctgcctgatctgtctgcctcagtttcctctctgagcgctgtctcctgggggttgtctgacactgtctccccacagccctgccagtaacttctcaatgccctttgttgggctcctcctccatccaagccttgacattctgtcttgggtcctcttgtcttcccatgctccttcccttggcctccttataggctgaatttccatctctagccaatgattgctagagtccacctccagcccaaacttttctcctgaggcccaggcctgggcaccctgttgcctctactggatgtctcttgtctttttaatgattatttatttgtttatttggctgcactgggtcctagttgaggcatgtgagcgcttagttgcagcatgtgggatctagttccctgaccagggatcgaacccggattgattgattgatccaggggtcaagacagggatcaaactctccattgggagtgcagagtcttagtccctactgggtgtctctaaggtagcatcaaccgagcacatctcaaatcatctcatcattttcttttgtgaaacccatctcccctcccgagcccccagctctacattcagccccaccacccaccctatctttgaagttgaacacctagaagtccctgatgtgtcctctttctcacccccacacccagtctgtcaccacaccctgctcagtccatcttccagaagcctgtacaacctgtccaggcgtcctgagtccaccacctcgacctcaatccaaacactccacttctcccctagtggagagtcctaacgggtctctcaaagccacacataccctgtactgcattctcacagcagccagaggggtctttctagaacacagatctttccatgtcatttccctacttaaaactcattactgtctgccaaatgttctccagtgaaacctccagatgtttggcgtctggtcgcaccctccccacccaccccccaaacccggccagctctctgagcacaaaccactctgtcttttcagctttttctttcaatttgctgtatttcttcctgcctctgaggctttgctgttgctgttttctctgtccagaatgcttctccttcagcatccccaccaacccatccttaagagatgaggccaagggttgcttcccaccttccccccagggcctctaggatttcgacagctgccaggctgtttgcgctcacccctgggagcttgtggttgcttgattcatgtctgtctgggctcctggactgcaaatcatgaaggccaggggccatgtctgtcttgctcatcctaaaaccacactgtgccaggcccacagcatcccacagccccacctgcccaagctacccccagtccacaaagccagcattaactgccccagagaccaactccaggctggaattcaaggcctcacccttccaaaactccccatccttaacccctcacacacaccttccccatccacactggggagcctcctctctcctccctttgctcccccccatttttccttcatccttctttctctaatgatattcaagctcaccattctccaatgatgcttctgttccctgaccacacagcccatcttattttggattgacaggcatcctccctagcttcaggatgaaattacaaggcacttgaggttctccataatctggctccggcctacactctcagatctccaccacccacacaagagtaatctggcacaagaggacttagccgttaaaggattcttggcctttctggattcaagccctgcttgcacttcttacaaacttcaggatcttgagcgagtactttgctaaacccctatttcctcacatgtaagacaggaacagttaagagtctccacctcattgaattctgtagagattaaataaggaaatccacaagaagtatttagcccagcacttggcaccaagaagctccaagctcctttcctctatcatggccctaattggttaagaacctgtccttcccatgggtcctatgttcagaggggatcctgggtgcctttcatctctgtttcccctttgcctagctcagtgcctggtcccaagaaaactcaataaatgcttattaatgcatagatagaccacacacttggcacaagtcatctcattgttcttcactttcatgtgtgtaaatcttatctctcctaacagagtttgagcttcagggtatgggggaggtggtgctgggagaaggtggtgaggtgtcttcatgtcagagcatccagaatgggagggatctctaagctcttgacatccctgtaccccccatggtgcccagcctggagcagggagtcatgaaggccttgttgacagatgggcctgtcatattccccaagaagaaggcacgtctcccgctccgagatatcgccctaattactccctggtccctcccctccacacacacatcggctttcttaggcaagagcctgcttgacttacacacatggagttcttttagctggtggttctgagccagctcagccagtttcttcagaaactacagcagaaagagaggaaaggttttttaaagccatagggcacaaaaccagagtgagggatgggtgaagtttccccagcaaaaggccagcaatggaccagcattggtcagatcatctcagcactgttccaaaggcaaacctgatggcatagtagaagggttaagtgtgtcgggctctgcactcagagactctcaggtttattccaggctttggccctaaccttctgggtgacgctgcacaattgacttaccctttctaagctcagttcccttggctatagagtggggacaatgttagtactaggaggatttaattagacaagatatcaaagggttggctatcactatgattatgatgatttttgtcattattattataataccattgaatataagatccagaaggaacctcaaaggtcatgtgagaggagagaacactgcagccagcagaggtggcctgactttgctaaaacatacagcagatcagtgcttttttctttacctctttcgctgacatctttcagagaaccaagggagtttgctcacttacccctgaccttggagttggtcccctaccttgacttgaagaacacagatttgggggtcttgaagccaacaacgaccaaaaaaatgggcattgttttcaccaatgggccctcgccagttggaggtggcccagccactgctgacaccatgctataggatggagcatggcctctacttgctatccatccttgaggaagggactgtgggctgggttcactataggcacagcctggacttgggaggcaaggcactgtctgctcccccttctccagctgagttctgcactctggcctctccttagcccggcccaggggctctgcctgcccacctgcctgccaaatggaatccctgcttccacccatcccaaatgcctcttccccactgccctccctctccctgaggctgggaaagacctggctggtccatctagaggatggcactgggcagggggcaaggcttagggagctgtggaaggccgctgccccgggtcaagaaggcaggtctccagcaatcttcaagggaggtgtgctctcagggctgaaggggagcccaacagcactgggagaaaaacaaaaacaggaaggcttgccatccagtaggcagctactctctccttggctcaaattacatgtcattccagtcaatcttggcaatagctccttctccactgggtggtttgtgagggcggagtgggaagctacatccacagcagagtacctggaaagaagaagcttgtgttaggggtgcacggtgagagaggctgccagctacttctctgtcgaagtactaacagaggtgccccttagaatagaccttccttgttcaggtacatctccctcggccagggtggaggaagcacgctcctctcaactccccaaacacaaagccaggaggtccccgtggcctgacaaaggcttctactactccattggctacagagctggcctcagaagcatcagtgggcaaatatgcatggggcccaaaaagcttccatgatcagggcctgcgtggggcacgcatgctcaggcactttagtcatgtctgactctttgcaaccctatggactgcagcccgccaggctcctctgtccatgggatcctccaggcaagattactggagtgtgttgccatgcccttctccaggggatcttccttaaccaggggtcaaacccacgtctcctgctttgcaggcagattctttaccaacgagccatcagggaaacccttctatgatcagcactgtgtcttaaaagttgggataacccattgtctagaaaagactccaaatagctggtcccctctccatgagggaagggagggtctgaaaggaggaccagattcagcacaatgtctgggattttggtaggagagctggttctggcttcccaagtggctgaagtagaagcctctcttggcctggcatggtggtttgctttgaggccaatggctaagaaagtgctaaccttggacccaaagtgcagagatcgcaggagcacaggctccactgaaaaggagaacaagggtccgtgaagctgagcagagcacgtcttccacagcgcccccattgtcagcagcagcagttagcactgatggcctggtgaggactagtttctctcttcctgacactggaagtaggagtcttctcttgggacagagaaaccttctgggtctttctggacaagggacggcaatggcttcagtcaggagacactgaacttccattaaattccacaggcagatatttgagcaattaactggaaaatgaagacttgagaccagtcctcccaaactagtgaggtgcatggttctggttattgcatagaacttgactatctcgttggttcctcataacagctcaacaagcaggcataattatacccactaaatatatgagaaaattgaggttccaaggagtcaaagacacgtgccagttcactcagctgggaagtgttggacctgggactggaatgatctctgctcagtgccccacgagattgaacagaaacctgaggacccagggccagcgcttctcatactgactctttcctatccttcagattacagtttaaccatctcctcctcaaagaggccgctgagccccagaacctgcagtgtgttccccccaccccatgacatctatacatctggacaatatttcttcctttcttagaatattatcataatgatcataacctcatttttacttgtggttttaaaatctctttgatctgcttctctctggagaatgttttccccacgagacagcacataatgtgcagtgtgcaccactgagccccaggcccagcacagggccgagcacatggtggaaccctgtatattgtttgaaggaatcattgagtagatggttaacgggtacttgaaagcatgtcctctttggatggcatgaaaaatcaagatgatcataagagagaggagaaaatccaggagagacacaagaccccatctccaaattctaaagggctgtcctgtaactataggaacaggtggggtgggaggcacaaaactggggttgctggaaagcaggactctcaatggttagggaaactgagcccctttcgaggctcctgccctgtataagcacaccctgaccatctatcccttcctgccccacctgggaaggactccagccatagctaaaggaggcttgtcaggcctgagtggtggctgctcagggactcaaagcaaagcaggttgttggggcgggctccaaggaggaggtgagctgcagggcttcctgggggattatcaggagcaaggatctctgggcagagacatgggtctgtctgctgaaacttgctcagagcagcttctgggcttcctggtcagataattgcaaacaaaatagaccagggactgggcagcagctacaaacccctcttatataagagaagggcctgggctgaggcatgcaggagcaggcagcagggccctgagtcatacaaggaacgagacccattcagaacagctaagattctggcctcagaagctttcagtgatgatgctggtggctttgcctttctctggccgcaggcttcccatttgcaaactgagaaccactggacatccactctgtacctggccagcactggggagaaggaggcattgacactacctcccagacacccaggaaggagcaccaactgacacactctggttcagacccggggtcagggaaaggcagtggggtagggggatcagcagagtacttccagaaagaaggtggaggacccatgctttaagctctttctctgtccctcttaaggaaactctgaccacccagaagagactggaaggtggccaagaaggatctagccgcaactggccagcagtacctgggactcaggtgcctgggtttcctcggggaagtgcacatttatgctcatttgtattatgctgcaatgtacatatatatatatgcaaatcacatatttgtgtgtttgtgtatgtgaatctctatactcctctgtgtgtgtttgcttctaactaggtttaattccaactctatgtgcccatgcatatgtgtgtgcccttgtatgtttctaggtatacacaggagtccaagtgattacgtaagttatacacatttattcattccagatatttatagggtgcccattacatgctacgtgttgtcctagggctgagaatgcagaggaaaaaattcaaggtctctttcctcatgtagtttgcctgcagcataaaagataagcaataaatgagggaataaacaaatgaataaataattgcagattgtgatcacttacatgaaagggaaaaaagcaggataattagagagtgacttgactttacataaagaggttaggaaagacagcttggaaatacagaaactcaggcctcaaacaagacctcctaattcagaatctgcattttaacaaggtccttagagggtctgcatgcacatcagacattaagaaactctcattaacatacacatgacatggaggacaaagggaatagaggcaaatgccacagatctccttctgctgctcgccatgagataatagttgggattcattgatcagtttccttcttccctgggcagaattctttgcccacaaaaatcactcaaggatctgaaaccttggaggccccgcccaactaaggctaccgcagtcttcagctgttgctgttcagtcatgtccaaccctttgtgaccccatggacttcagtaagccaggcttactgtctttcactggcgttccctgtctttctctacctcctggagtttgctcaaactcatgtccattgaatcagtgatgcagtcttcagttaacttttagcctaagacattttccacctctgttactcactgcccccactgagaatcagaaagctgatttccccatgacagaatcagtaaccccagtcacactgaaacccccttttctactagcttgcccaaagacataaggagttttcaatggtcagctggcgttcttaacttccacttgaatgcaaatattcttgcatcctctagtggaaacattccttccttgggcaccaaaacttctgaccccaagtttgaggggcaggtccttaggtgggattgtaggcactgccactgctccttctgctgctcagcccctggccctgtattccagctctgggagaaatagtaccatgtatagccagctgattaagagtgaatacagcatcttataggatgccccttccccaccaccaacatcacagtgtcttttaattccctttggctctgggacctagatttttattaggtcatttcataattttataggtccattgatttcttggtaatggggtacccgggatgaccaatggatccaattatcttcagtccattggcttactcctctccctgtaaaatggatttcttgatctacagcaatgttgtatgggatatcaagacagtggatgaggtattcatagagtctgcagatggttctgctggaagaattatggcaggcaggggaagcagatccaaatccagagtaagtagctgttccaatgaagaaaaattgctgttcctcccatgaaggaaagaatctgatgtcgtctccccctgaccacgtgacagccacagctgctttgtcactgagtccactgagcaagccctggggtgaccaggaaaagacaccaacaggcatccacaggaggtcatcttgaccacctgtttcttaaagccctttcttccagggtcttcaggtttcattcgagtgagtgttcttataggacacaagtaaactcgtgatgttggatccattctgagggtccaatcacatgccttttctccaagcttctctttcaccaacccttcagtcctgtctcttcccagtccctgtccctctgaccaaatcattagccacttcccatacatcactgtagaacataaacctctgttcttccagaccgagacagtgagacacaccaaagtgctgctcactgcggggatttctctattctgtcctccagggatacctctaaatggggctgtaattacacagcctcacactctactagcataacacgcagagccatttgttaagcaggctcagaatgcttttctcctccatacatgggctatagggaattcctgtgagagcgtaagtgtctgctgagaaagatgcagtatccagcaggtgtgagccacctcttatgcaacatgcttgtgctttcaggacctgcttgggtccagaccactttaccacctccactgaaggagggagtactgttgggtgtgctcagtttaatgggtaggtggacctgataacacagttgttctcttggactaaacgattgcatcatagtctatgctcaggtggttagcctctgttagtgccaaggggcaagccaagagtcatttctcaagaggtgaacatttgccagagaaggcatggtcttgctccaaaaatgaagcatctccagccatgatgctgctctctggtcttgccaaaagactccatgcagcatctcaatctgccacaaactttcagtacctttgaatctagtatattataaaaacttggcttgaagtcttaactagctcagatcccatttaaagccaacagcttttttgctcactcaggagctggcttgaagtagaagacacaagtgtggtagatgttgcctctaaaacccaaagcagcccaccgagtgataagtccctttcttagtgatctgcgatgtagagtgtcacagcctattcttcactttgaaggggatattctgaatttcccaggctgatattttcccagaagcttaattgagttccctgtattttctcagactatttttccttcaccatgcctctccaaatacaattgtatttcaagatacttattatcttatgatctctgtgtcctacgagtaagatatcaccaggacgtctctggcagtccagtggttaagactctgcttccactgcagggggtatgggttccatccctggttagggaactaaaatcccacatgatgcactgggcagccaaaaaatcaccagtgttctagatgaatgatgaaaagatcgatgtccctatgaactaactcgttagagggccagacgtgaaattagagttgacacagcatcatggcgaagtgggaggtgcactgctgttctgcctcgagaagtctacacacttttgatgtcctctgattattaccatagaggagtgaaagtattctctgagtgttaggtttgcattaatttgttatagccacaaaaccatacttgaagcatcatgggactataattggagttaccaatatatattaatgataacaatcccacgttaatttttaagacttatctatcttacgcattggtcaaactagaaaattttgaccttagccttaagctttgtggtcccaccaaagaagtgtcattgcactgacttactactttgatgttgtttgaaaacctacagtggctttcacttaggctccatgggtcagggagccagtgtagtaaatctgccaattctggggttgtctattctaactatacacttggaatctgggtaaataaccacagatagtactgctgtgtggtatggaagaggctcagatcaacattccaaattaaaaagtttatcttatccaaataaatccctaatctaatcaggtcagtctctggggtaactgatttctttagaaatactggagtgggttacccttttgttctccaggggatcttcccaacccagggatcgaacccgggtctcctgcattggaggcagaagctttaacctctgagccaccagggaagccccttcattcagggctagtatctactaattctcaaaatatctagggtctttgcctgtactctgttaccttgaaacatgaccacatatccctttggggaaggacaagagaagttttaaggaattaaattattacccaatgtgttattacatagtgtttcttcaagggggtcccctcctcttttatacaacagactgtttctgcttattgactaggggaggttctgaaaattttccattgtgatagttcagcttattttctactcataagatgcatgtctattttattatatgaatcaatatagggcttttgtgggctctccacctcttctggccttaaacccatgatcattaaccatgtccaaaaaataaagagtgccctgttgtttgaaccattccaattaccacgaggctctgctcactatgacggtcacacacccagcctctaacctcgaagtgccaccacatggtctctgccacactacgatcctcccatttccattgacaccagggacccattcagctatggcaggctctgccaggatgcctagctcacagagcacagccattgaaggggtttttcaagggggttggcttttccttcatcagtgttttcccccaaggtcttgctgaagggactcctaggctttcttaggagtcaaagtttagagtaggaggactcttctttcttctgaatttttacatcaagaaattctttcagctcctaaaaccagaacattgaatccagagctcagcaacatcaggaaattcatccagatctagaattcatccccacatatattcccgagaaattggccaagataaattagcaaagtcttacaattctgtcagcgagtaaactctctccactaaggtttgcctttgtaatttgtccccaggaacatactggaatctgatctagtcataagcctgggggactgtgaggaatgttggtttccctttgtaagataacacccttaggcaaggagtctttaactaaggccagtcttgtctactagggtagcagggccaatttggcaaacatggaggacttcctggggtttgggagtctggattgttgcgtctgtcattctcgggcttagctccatttggattctcaattctcaccttttttggattaattttttcaattttatggaagaaccctgcaaaggttgaggattcaaccattagacttcagcaactaccagaacaaacctttccaggtgtgtgtattctcagtcactttagtcacgtccgactctttgcaaccctatggaccgtagcccgccagactcctttgtccatgggcttctccaagcaagaatactagagtgggttcccacgccctcctccaggggatcttcccgacccagagattgaacccacatctcctgtgtctcctgcactgcaggtggattctttacctgatgagccactagggaagctcctggtgtctcaggaggtaaagaatctggctgtaacgcaggagacccaggttgtaggttgggaagatcccctggagaagggaatggctacccactccagaactattgcctggagaattccatggacagtggagcctggtgggctacaattcttggggtcacaaagagtcgaacatgactgagcaactaacacttttcactttcaccagaacagaccggccctgcctcaataaaagatgagactctttcccagtcatagcaagttcctgaatttcagtccacgccttcaatcaaggctctagggacttttgttcattattttctttccttaagctatccagtgccattaaaagcaaacattccaccccacagtcctcagagtcctcctgccctttattcttctctgtggcacaggtcgtccaagcccctgatggcttgccttccatgggtacttcattttaggtgaccacaagggacactttaattagctgtttcagcactggggaccatgggcttctgggtctcctccctttgtgctagctgttatctcccagccttcagccctaactagggcaggagccaatcccagattcccaggattccctcggggtctgtgcctgcaccccaattacggcaccaagatttgtactaatcagggtacttgtttgcaaacaacagagagaaattctgtttgacatacactgaaaatacacaggcatcaggatgttcatcgaacctgtgcagaagccagaagaccaggcaggatccagagagacacagacgaggtcttgccacaggaatgatacctcaggagctgctccgggggtgtcgccaccaacctcctgtcccaccacaatgatcctcagtgaccctgcaccttaggccactctttctgttgagcagtcgagtgtgagtgtgtgtgtgtgtgtgtgtgtgtgtgtgtaggtgcatgcatgtaggtaggaagagaggaggaccagcgagtagctagctctcttatgggatttgtagggcaattagcactaaattagacgtgacctatgccaggctgaaatcccatctctaccatcaacttgacccagttgtgttatcttgagcaaatctctgaccatctctagacgggcctcagtttcatcatctgggaaatgggaacaatatccattcttccagcctcactgacgtgttgtgctcccacaccctccttttctcatggataggacttagttcaatgtataacgagacatttatttgtgaaggtaccactaatgttcctccagtagacggtaggctctgtgaggtcaaggacttcatctatctgcttagtgctgttaccccaacacctagaaaattgcatgaaatgtagcatgggcccaagaaatatttgaatgaaagactaaacaaggtaaaggatcaggaaggggatttgtaaatcgtcaagggccgcacatgtgtaagtgctggtgctttggagccagagagaccttgaaagtgaaagtgaaagtcactcaatcatgtttgactctttgtgaccccgtggactgtagttcatggaattctccaggccagaatactggagtgggtagcctttcctttctccaggagatcttcccaacccagggatagaacccaggtctcctgcattgcaggcggattctttaccagctgaaccacaagggaagcccaagaatactggagtgggtagcctatcccttctccagtggatcttcccaacccaggaatcaaaccggggtcttgtgcactgcaagtggattctttaccaactgagctatcagggaagccctgctgctgctgctaagtcactttagtcgtgtccgactctgtgtgaccccatagatggcagcccaccaggctccccggtccctgggattctccaggcaagaacactggagtggggtgccatttccttctccaatgcgtgaaagtgaaaagtgaaagggaagtcgctcagtcgtgtccgactcttctcgaccccatggactacagcccaccaggctcctccgtccatggaattttccaggtggagtggggtgtcattgccttctccaatgcatgaaagtgaaaagtgaaagggaagtcgctcagtcatatctgactcttcgcaaccccacggactgcagcctaccagactcctccgtccatgggattttccaggaagccctagagagaccttaattatcactattattgttgttgttataacccttgaattatatatattcagacacacagaattatttttagtgcaataaatgtaccattctctctctgtccctgcctgagatgctctttccctttctctccccctactcttgtgtcttcttttcctctacacttaggggaagtcacccagtgtccccatgagttcccgccatcacctgcacaccagcctcagcaggggccccctgcccaagactgtctgggagtcatctgccccaccccctccctccagctactccaggacttactccagaactgcagttacacctccttgtctggaacctcgggacctgacccaagacccagcctacaatggaggtttaggaaacaaatggataaatgaatgactctctgttttcaaaattataaaaccaatctctgtctttgcttgaggacagagtctgaagaaatgacctaaacccacagaaagatgcactaaaattagaccctaacagaaacttccccagtcgtgttatttactaagccctacaggggagagacagagacgagggaggctttccttcctcctggggaaaagcgaggggctagggagaggaagtgagacccttgggaaagtatacctccattggcagggagctcattacttgttgaaacaggctcctccattaccaacttccttcagcaaccagagtccactcagtcctcatgtttctgatccctacccttcacctctcccaccatcccctctctaaagagagtgtgactttgcagagctggcagccagcaagcctgccaccattcccaaaagaagacagaccttcctaacagtagtggagcaggctaactcagaaggtaatcaactcctcgatggtggaaatggacacagacctgccaagagatctgtctttgtaacacaacctcacttatgggagcactttaagcttaaccttctctcttggccatttgcgctgggttttgaagccatttttccaggtaaaagctgaaggaagggcattcaagacagaaggaatggcacgtatggaagcatagagatggaaaacggccccatgtttgcaaaaagacaaatcatcttgactttcaaggccggaatgtggggccccaatatttactgagcacagactctgcacagatgcaggggtaggacctggagagatactgcaaataagacaaacacacagtctccactctcatggaatttataatctagtgggggaacagaaaagaaacagacaaataagtgtgggcagtcttttcagatggttccacatgctgttaaaaaaaaaaacaggtgacacagtggagaacgactggtggttggggagcacctctctgagcaagtgacatgtgagctgagatctgaaagcagcaaagagatagtcacgcaaagagcaggctgaagaagttcctagctagaggccagcaagtgcaaaggccctgaggcagagacaaacttggaattacagagaaacacaggaggccagtgtggctgaagagtagggggagagtacctggtgctctgctggtctcccctgccccaatctctctcttctgcttggacactgggtctccaagcccagctgagtgttcagagcaagacactcactccctgctccccagtccccactgcttcaggatcctggttcattctggcagcaaatctctgcccatctcagtcagctctgcaaactcagcctgctgcatcctgcataagcagcccagcatctcagcccctcctcccccagccaagaccccagcacccactccaacctcaacccagaagccagggttcaagcctggtccaaaggggctccagtcaccaagctggatagccctttagacccaaaccaactgaggagccagctctggaggacagtgtgtggggcgggggggtgtcaggagcggcacattgttcggagatggcagagccagacacgagatcccagactagatagagctgggaacgaggaggggggctgggcttggcgttcctgggtggtgatgccatctccccggcaatggagggcggcaggcaggagcctcccattcccccagaggacttgtcctccctgctatctgatgagggagctgtcggttacaggaaggcaagactgttcacaggacagctccagggagcaggaaattaacccaccagccagagacagggggaggggggctgggcggggcaggtaattaaggggccctgcaattactgtgccttcaatctgggccagagttctcaggaaggggatggagatgctgctcagtcggaggccccagctgactctggcagggggcatcagccctgtctcacactcttccttccgtttccattcctgtctcccctgggccccatccctacctctgtccaaccacaagtgatccgctcattctcatctttgcacaactgttcctcccaccctaaaggcctttcccactcactcgatcctgcccttccatcggctcatgcaaaggactgttctccaagaagtcttcctggagcagtcatgtcggaagggattgctctgagctcacataacacagcccttttgtgttacgataagggaacagactcagagagggcaacgatcggtccagggtcacccagcagaatcaggactagaacctgagactcctgcatttgggactggattttttaccaccaccctgtgagctcactaaccgataaccagcccaggcgtcatcacatgccaaccacggacacagactgaggaccacagaagggtcaaggggcccgtcgcatttatccagcatctacttgctctggattgcggctggggattgggaatgctgtgaccagcagacacagacacagccctgcctttagggagtttaaggacccgccacaggatcacccagaggtatgttccaagataaactaagaagaaccttcaaaaaagaggccccaggctggtgaaaccttgtgacaaagacatttaacccaacctggggcccgagacaggcctctctggagatgctgggcctgggctgcaatctggagagtggaagacagcaactagatgaaatggagcagggaagaacgttccagacagggtgtctggcatgggcacagtccagcagaggaagtccagaatggctggagctctgagtgaagaggtagcctgagatccagcagggaggccatagggccccagcgatacaggactctggcttgggcatttgatctttatcctaaaagcactgcaaagccactgtagagttttcagcaagggaactgtgtacatagggaataccactggctgcagtatgaggaaagggttggaaggaaccagtgaaagcggggcctgccgagaggctcctccatagtccaggtgatggtggcggagaccagcactgtgccagcgggcagtcaaggaaggagtgttgagaagggatgtgttgaggatggaatctcccggggcagggctaggacaggggtgggggacaagctggggacggagtggagggagaggaaggagtcaaggtaaccccctccaggcttctggtttgtgcaatgagatgggggttaaccaccaagctgggggcagtgtgggaggaggggaaaaggctgagctgcagatgcttctgagagactggcgtccattggagctagagaccaggggtgagggggtaaggagacgccacctgggtcgtgtggtgagtgcaggcctgaagcagctactcggagccacaccttctctgtagctcctttagcacgacgggtgccgctgctcccactttccagaagaggaaactaaggctcagactggaaaactgcttacatagagttccacagtggcagaaccaagatctgccctccctgagtttttctcacttcaagctgcctcaggatgcctctctggctcgaacctggcccagaggagaaagcagagccacccacatacacagctgggactacagggagctttaagcatctgacaggcccttggtgggaagcttcccctgcagaggagaaaagggctaggaaggcagcctggagatgagcaagggccccacctccccatggtcagggccactaatctcacgctccttctgtgcattatacaaacttactctgctgggcccttcacacccaagaaggagtgctgttgctattcagtcgctcagcctgaactgataccccatggactgcagtatgccaggcttccctgcccctcactatctcccagagtttgctgaagttcatgtccattgcattggtgatgctatccaaccatctcatcctctgccaccctcttcttttgcctccaatctttcccagcatcaaggtcctttccaatgagttgggcttcacatcacgtggccaaagtattgctgctgctcccattttacagctggggaaagagaggcccagagagaggacagtcaaggtgagtttgtggcaaaatacagaaagccagggatgtctggtgccaggttcccagctcactctctccaaggactggaggggtttagtgagcagctaggggaggcagagagtgagaagccctgggcttaagggctacccagtccctcctatcccccatcaacccctcagtgggcctgggcctctggggtgcagacccgaggggatggggagaaggatggtattgagtctgccaggaagcttctgagagcctttgtggctacctgagcatccccactagcatctcttcactcttccacctgccctcacctccagagccaggcagcctcttgagcccaagcaggggaagggagaaggctgacagaggtctttccctgcccgcatcgtgcctgtctattcagttatcctcctgtcggggcctttgggggcagtcccgttggtgctggaccctctggtccctttgttcagaagagacctgaacaaaggggaccgagaccaagaagcagcagccagctcaggtggggagggaacaggaatcctgtggcccacaggagggtgactgctggcccagcctggagaaaccacacgctggagaaggccaaccctgtcctgtgaaccttgggatttgcaggtgtgatgggaagacccaactgcacagaagcagttgcttccctgcagaccccaagggatagcaaggagagggcagagcttagagggtcaaatatgtgtgtggggatgccgaggacaaggacgaagcagaaggggtcctggccagcagggggcgccagcgcaacagaaatccaagcaggtggtttgcaaggagcctgaaggccttgtctcaagtccggaggttaccagggctagagcatgatgctagagcacggaatgaagaggcacccactgatcagacctggctgttgaagcacgaccccagcacagggggcccggtatggtgtcataaataagagcccagccttcagaatctgcaaggacagatgagttggaatcctggttgctgctgtgcggccttaggcaagtcttttcctctctgatcttcagtccacctccataacaggaagatgctcattgcacttccagcctggggtcctggcgtgcagtaagtccccagtaaatggacaaagtgcttcataaaaaacaaagaatgcgttcagacgtcaggactggcaggaggatgcccacacccgccctccccccacccccagccactgacccagggtcctttaccttcccatacaggttggggtgggtacccacttccttcagagccagagggggttcagtgcaggaagaaggggcctcagggacagaatgccaggcaacgcaccagggatggagctgggaccttggccacttgacaggtttgcttcatttgctcaacaaagttatcaagcattcatcaagcacctgccccctggcaggctctgtaccaggcacagaagtatcaggtgagaaggcacacagacccaggcagtgacacctcctgctggccccaggcgggtggggccgggttctgcccctcctggcttgcgctagttggacacatcctggggccacttgagccacaaggccccgctactgcccaggtaagatgacctgtgactcagcagtcaaaggctcttgaaggctggaggtcagggagtgggctggcggcagaggtgggcatctcccactcttgtgctctcttccctgcaaaggccgctgcttgcagagactctggagctgacaaggcttggttcacatccaggctttctacataattcccagggcccctgagggagtcaatttctaccctctcagccccagatgccgctaggagaatacaggaaacactttaaatgatttactatatgatttctctttctctttcataaagaaagctcctctgctacaaactaaccctgtgaggttggtattggtacccagctatagcaaaggaaaggctcagagaagttaagtgacttgcacaagatcacacagtatatatcaggcccatcaaactccaaagcctatattccttctagagcacatactagctcagggcagattgattgttccttcttgataatgggctcatctgagaccaaaagaatcctcagttcgcagaaagctgtcagtgatgaagggcccttctggggtcctgacccccaccatcagaagcctaaggtcttggttgataaccctggcactgttgcagactggatgacctcaggccaggtcaaggtccaaagctcataccaagccccaggctcccgctcctgaaatgcaggggaggagttaagcattggacacagcattcctggcctttctctgcttctcacctccacctgctccatcacacagactgacccccaggcttccctctccagggaatccatgagactagcccacacaaacatggcaagaagctgctctgctgaaaggtgctgcaacttctcagaagcatagtgcctgcccggggctgaggctgcaggagctcagctgagatgccttcctgatgtatcttgagtttcccctgaggatttcctgcaggtcctcgaagcagaccttccagctgaggaagctctgcatctgggaacacaagagaccctgcgtctgtctgggcagagagacgcagtgggctgaagtcttccctagcctgttctgggcttatgtcttggtcgctggcactgctggattctcctggccacaaaggaggtgagaggctcagctgaaattgtaagggactcccagacctgagatgctccaattgtaattaaattccctgatcaagccatcagataaactggattgccttcacaagagcacagaatcagccagctataatgccagacccacagctcctcttccccagcctgcaggatgatccagcagggggaaggtactgtcattaaaaaggactttggggagagaacaaggaagaatcagatgtggaagagaactgctaggacgccccacagccaagcctgaggtcagacggcaagtgcccgggaaggaattcctggcaagcctgcgtcctcatgtttcaccaagacgtccaatgtgcctcagagaaggacaacatcagtggctaaacatctcttttccaggtgggatctggcagctggaaaacctgtgctgtagccagagtggtaccctgggttcttgtttgcatccggagcagttttagttgcataaaaaggaaggtgtgtgtgtatgtgtgcgtgcgtgtatgagggtgtatttccccctcagtataacattattgctggttaacaggataaattgggaaaatgcaactacaaagcgaaaccacacagccctgtctcccccaacactttcagccttctagtgacttctgtttgtcctcgggctttagaacactctctgctgtctccctcagcacagttaagattttaaagtgagcattttcctctcactctgagcccttcctctgcccaaaggctgctccctggttcacagtcttaaggtcgtttccatcttctgctattctggatacgcctaccacaggtgcctgcatgtgtgggaagcttttcccacgttctgaactatcccctttggatgaaggctctccatctgaagatcctctttgcaggttgattcttggagcctgtgagagctggagaccatgcctcccaacctgggagccctccacgttctttgtccccaaaatggccagagggcatacctgcgagaatttcccttctgctcaaggcccacagggatgcgggtgtcaccccagtggccctgaaaaggggactgaggctcctgaggagacaggttctcgtttgcttcatgtatgaaaaagcagcccatcagctggagatttctctttggggttcacggtcagacgcatgggggtcttgtctctgtcactggctagctgtgtgactttgggcaagttacttcccctctctgagcctgtattctcatctggagagtggagatgataatggcacctacttttctcgagtggctgtacacatgaagtgcaatgatgcaggtaaggccttcagcccagagttggctacagcactgtaagtggttaacacattggaaccattgttgttactcagccgctaagtcgtctctgactctttgtgaccccatgaactgttggttggaaccacagatggctactttagctgcatagccctttcagtccaaaaggtgtcctctgacttctccgggtgttcatttctccagggctaaatgggactgaggatgatttctgcctcccagagttgccagggagcaaatgagcccactgggataagaaggaactccttgtcaactgcagagcgcatggtggtcatttactttgcttgttgttggaatcttctggtgggaactcactacctatggatggggccccaggggcagatctggctaatacagcctcctccaggaagacaaagcctgtctctagctcttcacaagctggctccaacttccacagaaaccccccatcccaacccccgggatctgggttcacacagcgctgaggtccagccctggatgcatcactcccatctgtatgtccacgcccactggcccttctgtccctcaggcttctctctgtaaagtggtggctccccttctgccttcttgttagacagagcaggtgagctcacagtgcaccccgtgggtgctcattcttcatacatttccttttccccgaagatccacaggccagagggccccttctcccagctgcctgggtacatctagaatcaccttcctggtgctctgcccgccatgcctgatgtgaccagagtgggggccaggctggtctgtgaaggtcagaggtgtggatgggctcggggtccacagagagggggagagcaaatgagacccagacatgccagcttgtccaggccctcccccaggtgaaggtgtagcctgggatgagagagctcttaggggggcggcaggaggcgggatacacagccctgccctgtaccagagctctcacagtggagagctgtggagtgtgtgagtgtgtgtgtgtgtgtgtgtgtgtgtgtgtgtgtgagtgtatgtgcacccagttcagtcgctcagtcgtgagcgctctgactctttgtgatcccatggactgcagcacgccaggccgtcctgtccatcaccaattcccggagttcactcaaactcatgtccattgagtcggtgatgccatccaaccatcttattctctgtcgtccccttctcctcccgccttcaatctttcaagcatcagggttttttccagtgagtcacccacctgcaattataaaaccagatgcagtcaggaatgtttcaggagtgctggggggctgtggcagaggtgtgggcagttgcccctggggttagggtgtggaggcagaggtgggcttctggaggagggcatacctatctatgggagccggtgtcttccagggccctgagaagcccctcccgacactccccttggtggtggctgcacagctcccgcccagaagccagaaactgaccggaagggcttaaggcagtctagactccctcccaaggagcccgacctggcctgctcctacctcctgaccctacccccatcaccttaccagagcctgggggccctgggagtgtggtcagggagctctccccacacccaatggccagggaccacgggggagaccggaggcaagacccaagaaggcaggcatgggtgaaagtcaggaagcccaggacccaggctggtcttcgtgggcgcctcctgcagacctggcagcctctatgcctgaaacctcacagcaccttccaagggcggtgttgtcatgacccccatcttacagaggaagaaactgaggcccgcagaagtgacagaaccattctcccaagccagcgctgagccttgagccccatctgtgacagagtgtggcacacagagcccctcaccatgacgctgctgtgggccagcttgcgagtcagtgtgcccacccctccccccgaccctgtaaggcaggcggcttcagctcccactaaacaaacaggaacaagaccccccaggggcactgccctctcggagtggagctggctgtggcaagtgaggactcagggcttttattgccatttcagacacacaggaaggtcaaagcagacagaggggatggccgcagaggggcctggggtctccccactgggatgcctcagctttgaccccacccataaggacagccatgtgcccttctcaaccaggagggcaggtgtgggaggcctccaggacatgagatgggtcagcagacaccacctggcctgatgagcaggtccacccagggtgacctcggcctggcagtcacagcccagtgccaagaggaaggcctgggctcgctggcatttccagaactgccaggcaccagggtgggggcctagggttggtacccatcacagctctcagctaatggctgagatgtcaatccaccctccaaagtcggtccaaaataacttaattagcttgaaagagctgctggcagcctgccaggatggggtgggggaagggtagcaggacgagggccccccaacactgcagggaagaaccttgacaggaagacaagagcacccccattctgtggactgtaccctttcctcatcacagggactcgacccaccatggctctgccaggtccagccaactgagcccactggacagatgaggaaactgaggctcagagggggccaggatgcgctctgctgtattcatggcagatgggcactttgaaagtggggtgatgctacttgggggcaggaaaagttcagccctagaaaagctggtggggtctctagggagagagattaaggtgccagcaacgtaccatcaagccagagggatcccaggttgacatcggaagggacttgaggctgcaggaaaggacctgagcctaatctggaagaaaagagtgtgtggcatgaggcagtatccaccttgagagtcccagcgctgggggtccttgcccctctggcagagggttttagccagagccaagtctctgatagggtggcacctaggatcccctgctccctgcagcccccaggacactgggagcccaggcatggcggtgatcgggtgcgatcagggtgagacagacacacagccactgccctccagaccctgatgctgccctgtcagtgccaggctgggcactgccccaggatcacaggcaagggatggctgtgtgtgtggcagcccagagaggaacatgggacgcccagtgagctggagctctgccccaggtgtctgctccaaggctgagctcactactggtcccactggacacttgctcctcccacctcagagaatacactccgtcaaccacccaggttcccaagtcagacactggctgtctccctcctgctcaccccacccccagtcctgcccaagtcacctcccgaacttttgtaatctatctatcctgcaccctgtcccccatcccacccaatccagaccaccactgtccctctggatcgctgccaagtccttgtcacccatttctctggtctgcacactattctctctgtctctctctcacatgcatgtgccccatgaattatcaagggaatctttccaaaactcaagttcaaccaggtcagcctcattgccctccccaacctggccttggagactggggggattttcccactcacctcactgaggttggaacagagcaactgaaaccctgggctccagatcagccaggtctgggtctgcatcctgggtgggccgtttggtgactgtgtgatcttggatgagtcacaccaccttcctgagctctttcctcacctaggaagcaaggctgccacgaccttcatcaagaagaccccatggggcaccagggtggggccatgctgagcgcccggctcagagcagccacaccacgtggcaccaacgggcaccggccagctcccggctgcctctcaacacccgcctcacgtgctgcaggctgtgacctgacccggcagctggtcctccctctggctccaagagccccgtaacaccttgctctccacctatcggttctctggcctgtctctacctgtgagcaggagtagagcctgggacaggctcgatttacatttgatgaatgaatgaatgcagtacgagtgtctacagagggacacggccacgtagagaggcgcacaacacacacagccacctgcggctcagacgggctgagggccagagggggcccctaggttggtccattattacacacccctcggtgcagcccagctcagcttgagcctaagaagaaagctcaggacctgttttctgagggtccacgagggtgtgtgccctgcctccatcacgaggcatctgagcctaccacactcgggactacaaggagcagcccagggggccacagcacccccctgggcagggctgcctaaagtgggggtgcggggtggagtggtggctgccagctggcgagcgcctgggcctggcagtgccgccgatcgcccactcgcaccagctgttagtttccatggcctgcccaccagctagccaggatgctgggcccgggctgccctggggtgtcctgccaggaagaggcagcctctaggagggtggcctgggcagaggggagggcagaggaggggcaggggaggatgaggatgccaggctggaggaggccagggccaccctccgctcacagtgtggcccggaacaggctgccgcacttccagcgcctcaggcgcctcttctgggcagtccatgaggggccggaggtggggatggtgcccagggctcctccctccgctcaaaacacccagcaacagggattctggaccctcgggaggggaggtgctccgaggtctgcgaccacaagagggcgcccgagcctcaccttgcagggagccaaggcctgaggcccgcggtggagctgtgcctgggagagggcctgggagctgggactgaatccctgggcgtggcatgcagctacctgcgtccattctcaggcaagaccccatccacactttagctcttttttcaactgatggcaacactacctgcttcagtatacgtctgcagagtaagcgcaggaacacgctgctgctaagtcgcttcagtcgtgtccgattctgtgcaaccccatagacgacagcccaccaggctcccccgtccctgggattctccaggcaagaatactggagtgggttgccatttccttctccaatgaatgaaagtgaaaagtgaaagtgaagttgctcagtcgtgtctgactcctagcgaccccatggactgcagcctaccaggctcctccgtccatgggattttccaggcaagagtactggagtggggtgccatttccttctccaggaacacactaattgaatgataacggtgatgtagtattttaccgatgaagagaatggactcagagaggtttagtgatttgcctaagtcacacagcagtaggcatggagcaagttattccctctggtgctgggtgctggcagagctttggaaagagtcctggcaccaactcacagggggttagcagcactcaagtcctcagggtagggaccaagcctgattctggctcccccaggtcaccctgtgccataaagaccagacccttttctgggcaattacattaatgaaaagaggtcccagctgtgagccctttacacacccatgaggcatcctcgtcctctgactcacagatgaaggaggaaggcatgagagaagttaagaacttgccagaggccacaaagcttagttccagtactttggccccagaatccaccctcccctcaccatgctatgtcctggggaaactgtttttcccaaaggagcttctggccacctccgtccctctcctgttcacccaacagctttcccacctattcagttggggcagaggtgaacaccaggcccggccccatggaccgaccaccacccaaggggagacagacaaggtgcacatgactcattcagggccggagggcccctaaccaatcaggggtgtcagggtcttctgtggggaggcaaccactgagctgagttgcaaggaaaaaatgtagcacaatggcccttgctggcctcccattctgggcccagggggagctcgtgagttgggagaaactggccctgtgtgggtaggaggagtgggcaccccaagggcgagtccaggctggttcccagcaccctccagcacctggtcatcacaaagtcatggtgggctcatcaaggaatcaccactgggttgtgattggttatgggtgttcatggagccaagccctccaccagccttcccgcctttctctcaggatgggtaccccctagggcttcctcgattctatggggaccagagttggcggggtcaccaccctctgggtacaccgggcacagaccattgggccaccaacgcagcacctggagcccagagctcagagtctgagcagagcctggctggagggattgggggcaccagccagggtcccagcctgctgccttttgcatcaccagcctggagcccagcccagggccggcacctgtgcctcaaggcaccttgaggacctaactgcgcccctctgagaccctcttcccctaatggggcagtgaaagcacagccagccccagtgctccctgaccctcctggtctctcagggcctcctgtgtggttctagaagcaggactcaggctgtggcagccacctctctccaccagtggccaccgacactgaggtgcagagggagcctgggggctgtgaaggaggctgctccccctcatcgtgccagcagtggtgagaatcagacttccccgttcaaggacccccagctgatgttctttgtacccctgtgcccagccaccccctgcccctcagttctggggtccgtcagcaccaacagccctctcctcctctgcactctcccagccatccccaccccggacattgcctgcccccagaaccgccccctgatatttcccccctcccacccaggactggcttctctgtccaccatcctccaccctccctgttgggctggcttcactctcctgaccccgctctctgacctcatctcacccccctttcctcctcctggactccctccttatccagcctatatcccaagggacctttctgcacccagagtctcgagcacaccgaccctcaaaaatctcccaccccattctgcaaatgcccagcctggggcagacccacagtgctcctcctagaggatcccatctgtccccaggccccagggtccccctcccttgtctctccccacttcttccttccatcaagaaacacactcacctcttgataatgatctttcaagctgctctcttagccctgcacatggctccaactgggccccattccttctccccagcctggtggagctcttcaagcgttacttgtgtgcccatctctgcctcctcagccccctgccctctgcaccgcagtccaccaaaactcttctcatccgtcactcctgctacatcccgagagagttgggttcccatcccaggctggggccagagagctgtgccctgctctccccctcttccctgccccctgctcgtctccatggccccacgccctagtgaaggtcccctggctgctccttactcccccagtaggtccttctgccatcctgtcccacagacgacggagctctcttctagccccacatgatcatcccataccactgccccctcttacccggtaccaatgttcccaaactcgccaaggcctgtctccacgcccagggatccaactgcgtcttcagtgtgggtcaactccatccaagtaacttaatcgtgacacagtaacttcatgaaggaagtactattattatccccaatttgcagatgggggcaccaaggcacagagagagttgcccagggtaaacagctgatcagcctctgaaccaaggtctccttcctggagatccctcaagagcctcagattcaccataaacagaacaagctcacgggctctgcactgaatgtcttcttcctggccaagctggcctttggactggacagtgacaagcgtctggaccgtgggcaattttactttctgtgggaagtacttaacccagagctcaacagcagtaagtggccagtacaggccagctgctgttgtcaccatggccctccaaacctcagctgcttctagaagatggggctattgggggaatgtctgagctcagggcctggccacacgggggagactatagccctggccactccgcacaagagcctttttgcagtaagtcaaagcagcatcaatttataatgctgcaagtttggcacaaatgcactatttttcttaagccaaaataaagctccaataagctgtaaaagccctggagttgggaggattctctgcggggtcatttagggtgagttagaacctgcagctgtgaactcctcagccacacatggcaacctgggtgggtacaccccagaatgctaatgaaggcagctgctcagggtcggggagccagctttgctctggcttcaggccccagggagagggaaagccatgtggggtgagacaggacaggacctcagccaccctgggctgcgtgatctgggccaagcccgggccccactccaagctgcagcttcttccgatggggttccgaagcatgactcagaagagggaagttcagggcctggggtggggacttcgaatgatgtgtgcaggcattttcattccttgggcagagatctcaggatttgtaatagtgttgtaggaaaaatgggattaaacatgccaatatttgcttatgtacacaaccgtttccataaagcaggattgtgccccatctcaatggaagcaaccccaaagtccttcttgtttggggcaggtgagcatatgggaggctggatttgatcccaaactctgccctttgccaatcatggtctccccaagggacggttccccttgcccgttccacaggtgaggagactaaggcctgactctaaaatgcagcatcttaacttgtgtatatgcatgtgacccagctcccagtctctctgacctctggcttggtgaggtcacctctgcccgaggccctgcaccctcccccaattccctggtgcctggcaaagaacccagatcttgaaactccagagctcagctctgcacatacaagttcacgatcagaaacaagtaggtaccctctctctgggcctccgtttcctcctctgagccttggtaaaatgagggtgatgatggtagctaccccaaacagttaagctaattcatgcaaaacacccttgtggtgcctggcacaggataagtgctcaaccagcattcaatccgttcaggagataggatctatgacttctactctgaagataagtaaacagagaattggagaggtttggccacttgtccaaggtcacagagctcaggagctgtgatggcagggggagggtgtgaggggggcacgagctgaggctcaaaccaggtctccttgtccccatcagggtccagatggaaggggagtcaccgagccaaagcccccagggcagggacagggagagaagggaaggaggagagaaacaggaaggctaccaggacagagacgggaccgggagcaagctactgcctggggcagagggcccaagcccgcaggggtcacggggcacggttccccgggctgacagtgggcactctcaccttcaccctgttctctggtggctggtgaccttgacaactcaacctgcatcactcacatcctagtaaggccctgaaggcagacgttttgggggtggctcatctacatgacagcctcccacaccttgagccagagccagggtcctgccccctcccctggagttcaggagcaccctgcccacccaggggctcccattctgggctgcaggggcaggaggtgagccggagccctgagaaaccaacagcctacctacctgaggtgacctccaaccaacctcaagacctagggcacctagagggtggggggagcctccacctacagcagccagcctccatgtgcccacccgcaggcctcgcccatctctgctgacagctgggaattcctgccgtgtgacccagtcagcctttcagggctgggatcctggcccagccacccagacacggttatagctcaggctgtgagctgcctatgaggccagggcaagtgattcccatctctgggacttggcttctccaggtcagaggagggatgagctgcgagctgaaacaactcttcccacccagaggatctcgggatctggaatcccagaagccaagtgttggagagaacttcgggctgcgatttcctaacactggcctgcagcctgacaaagtcagggtccccggggagtcctgtgaacatgtacacgcgggggctcccttccacccccagcagatcagcagatgcggagccgggtgttctgcagatttagctagtgccctgggtccatgccttctgctgactctcaggggtgggggcaggggaaggaaggggagggtggggctgagggttcttcccgagacaaggtgcccagggatccctgagcctcccaaaatctttactgcttcatcccttgagtgtcctcagaccccctcccgcccgccacccagggctggaatccagcctttgctcccatcagcaactcctccacagaattctccaccagcttctccccatcctggtcctcttcacccaggagaggccacagctactggcccttccagcttcccctcccactcaaatcaggggcctgctttttgttttcttcctctcaagcctgcataaagaacactggatttagatgaacagctctgtgcacaggccctgtctgggccccatgtaactgccaccctgttgagctctaacacatttcctccaccccaaagagcccccagtcaagccccctgctcactgcacctccccggcccccctcagcagacctctagccccacagattagaagggagaagcctctttctaagcagctcttctgtgctcatcaggttggactgaaacccctgaggacagcaactgggctgtcctgctggctggcagtgcctggcacagagcagacattcgggaagggctgtgagaggaaggacaaggtggctgcaggctgcacccctgctccagctgctgccgtgatgagtctccttggctcatcatcccagcttccttcaatgtctaccacactctcagcccccagccccctgcaggacgcctggcacatggacacgcaggtgcaacacccccacctgccccggccaggcctctgtcaatgctcagacacctctttccccacagggctcctgccccatccccaagccttggctcccagaatcctggaatcacaggcacaccgaattcctggatctgcactctccccagtgcctccagcccctacccactctggcctcacttgtcctggcaggctgtcttctgtccctgtcccagcaccgtctcagcccccacagcaactcagagcctccgcactaagctattagcaggaagtcagctctccctcatgcccacaggctcccgcatgtgacctgcgacgagcaccctcccctctccaagcctcagctcctccgtctgtaagacagccccatcaggctatgtggattcagtggactcttctggctctgatgtttcctgcagatcactgcccacggttagtgtaaataaacatttattagataaataactagccccaaagaatgagtcatcattgatggtggaacggtagacatcagctgcaggccacttagaggcagaattcaagagtggtggtgaaagctggattcagactgcctgggttggaaaccctggttcacgacttcctcatctgtaagatggagatcacagtagggcagggtgaggatgaagtgcgatagtgtacagaagcagccagaagagcacctggcacttaaccagcgctcaggagaacttagctcccactggtacccccagcgccactgtccctcagcaaggctcgggagtccacatcagcgacctgcgggtggagccaagcgtagcagcagtgcctgactagtgccaccagagggcaccatgacgcagccaaagccgcccagctgaaccgagggctccctgattcatcctgagtggcagtgccagccagaagcctcccagctgggaggacgagggtggggcctggatgcccgaggagttctttctgcaggagatgcccgcaccaccttggcttgatattctgcccattcctagcacagtctgtgaccaacagcaacccaaagtgtccctaatccttccctccagagccatcagacccatttaacagatgaggaaacaggcctgagagaggccagctccaggtcatgaggtgaactctggccttcctgctcagactgacctcccagtacaccccactaaacactatgggtgtggcgcccacccccacaaccaaagctgggagccagcacctgtgcccacctgacactccttgggcagaggagagacaccagggaaaaaagcacatctaatggtggggagacctcaaggacggagggcccggggaaagtgctggatgtgagaggaagagacaaagaaacacgaggcgaaacagggtggggtgggcacggaagacaggagatgcaggagagacattcgagaaagtgaatgggtggaaagagacagacaggggaagaggcacagagacagagaatcccgagggagaaggcaaagagagaagcagaggcagaaggacggagacagaggcagagggagcgattgaggaaaagagagatggggatggggtcatggtgacagagagagacgggaggcagacccagggacaaagacctgtgggcaggggaccctggagggccaccgaagcggcttcactctggtctggagcccccatgccctcctcccaggcactcagccagagctctcgcccttgcatttctgtcacaccccctaccccagcagggcttgccagacagacaccccctcttgggggtggtggttgagccgggttccctagggcatctaaggcagacaggtagggtccctggggccgtgttgctaggagatccagcccagggccccagcctatctcctgagcctctcctagggcaaggctcaacactcacctaggggctcacctgagacctggattccccctagctttcaccccgtctggccctggacagcctctgccctgcatcctcttggcagagggaaggcacacctggtgacccagccggttgccaggcctccctggctcctgccccaggccccggggcctgctgtgttccttagaagcactagattcccgggcttgggtgcaggtggcagggagattgttcaaatctcagcctgccttttaccagctgtgtgcccctgggcaagtcactctccccctctgagtcttatctttaaacaaaaataataacagtatccattccatagggtcctctagaggaggaagagccataatgagggcacagcaactgggatgggagactggttttaagctccatctctgagccacctgggctgcagctgggagcatctccccgcagtccctgtctcccctttgcacctccttgagcaggctagagtctgattcacagcagcctcaggggaaggggctgcccagagccctcccagggaactcagataccaggagacatgaacactaggggcccaggcaaaaccacacccacatggttgttcgggcctgtgtgctgctttggggccttagatgaaagcaacttcagggcttcccaggtggcgctggtggtaaagaacctgcctgccaatgcaggagacataagagacatgagtttgatccctgggttgggaagatcccctggaggagggcatggcaacccactcaagtattcttgcctggagaataccatggacagagaagcctggcaggctacggtccatagggtcacaaagagtcggacatgactgaagcaccttagcaggcattcatgtaaaagcaacttagcttccaggcccagttggcctatgggcaggtctgaccacagtctccattttacatatgaagaaacagacgcaagagctgtgcctttgcccaagttttcaccaacaggtctgatgcagctgatgcnnnnnnnnnnnnnnnnnnnnnnnnnnnnnnnnnnnnnnnnnnnnnnnnnncctccaggctgcggctcacctcagtcataaatctgaggctgcagtgctggccaggcccctggcaggcggcagggggcagctccagggagcattggagcacgccagcaagaggagtcccttccccagccaactggaactcccacttggaggggatctaagaactgggcccccagctaaggcaggggcttcaccaggatactctgggattccaggacctacacactgggcattcagcccaaagtccctgacctggggcctgttctctgcctgtgccacttcattgcctcggatctcagcagtgtcagtccaaggcggtgtgtgggttggagggggttggagcatttatggcttcatgccttccaagtcagcccatggttttgtggaaatagatacttgaggtcgaggccagccctctcccaccctggccccctgaaccctgcaaacaccttgacctttcacttaaaaatgtaatgagatgaaagaggccagcaccatgccaggctgccagcatgagcccatccacagatgccagctcccttccattccctctctctccccactggcactgggcacagagtcaggctggtcaggagccttctggatacttttccagggacactgggcccttggccagaaatgccttccctgggcctcaggagatgggtcctaggagctgaaaagagaaccagaggggccattgggtgggatgggatgggggggccacctggagtagggggacacatgtgtcagccacgtgtctggatggcttcctaggtgaactttcaaccagcatcgcccaccctcccgctctctggcatgtgggtctcagggggctcctgatgcaccttccactgctttgcctcccttccccccagaccgggacaccctccaaagtgagctcaaagcctggctccagctctttctagctattcaacactgtgcaagtcacagggctgtgcatgaggctgatgtaagacaaaggggcatctgagatgcaggtatgatctggagaccggtgtggtcctaggtctcaggctgtctgtgagagaccataggagagtgtggggggccatgggcagaccagctgggggaagagggatgtgagtatgcaagtgtgtgtgcatgttctcacacttgtctctgtgcacacatgtgtgtggtgtgcttgtgtcatgtgctcatacatgtgtgcacatgcacacacgtgttgtgtgcatatgtatgcacacatacgtgtgtgggcacatagcatgtgtacatgtgcttgtgtccatgtcatatgagtacactatgggtgtgctctgtgcacacgtatgtgagtgcaagcatatacatgtagcgtgcaggaacgtgttgggggcactgcaggtgggtcttcctggcttccctgtgtccttacccactttgattccttgccttctccctccctctgtcttcctcagctcccaccgctccctgcttccttccttccaggaggcccagctgcctggtctccagacagtggcccgggtggcagtgagtgggagctgatcacactacgcactcacgaggaccctctaatcctcttagctcccactgaaccccccggccccccggtggagacagcccatgcccaaactcagctggcctggggtcaccacagcagaggctcatgggctcccaagctggccctcagcaggttaattagtaacaatgaaccccaaatcctcactggggcttcagagggatacttctccatcaataaggcccttttctggctgtgatcccttttggtcctaacagtctcttttgaggtggggatttgaattgcacatttgatggtgaagggcattgaggccttggagagggagggggcctttctggagatcacacagcaggtcagtggcagaattcactcaactcaggctgctcccacacctaaggcctcacggaaggctcctcccggagccccaaccccccaaaggggtccccgctctttgcctcctgcctccacccaccatcccaggtttcctggaatctgactcttgagagacctaccttgcctccgtccatcccttggggccaggggtgctgctcagaaccacctggtaacagtgcagcctgcatgccagttccctgtgctgccattccagagctccagtggctcgttggtcacacagcagtcagacctatgctaatctgctcttgcagtgggagcacagagagctggcatcaccccccaacaccccacgctcccccgccctccctgtccacatcagcacctctgctttctcttcactcacagcacccagaccactctggtttccttctgacttcccatcactcccacggttttcttcttgtaggttttgcaccctcagacccttgggcctgcaatgtctcctccagaagctcttagtctgcctgacccctcagtgctgggcctcagtgtccctgccccggagaaccttccccgactcccagtctagactaagcatccctgccatttgtctccaaggcacatttcccagtgtgcctgaatacatccccttacgtatttatttgcttcatataagtctcgccactagagcataagcttcttgcctgatgtcatgggaactcatatgtccctgtatgtccaacataggtcggagagatgctaggagcgtagtagagtgtaagtaactcctcagtgaataaatgaagggaggagagatgaacaggcaggatgttcctcctacacgcctgcatgaacgaagagctatggggtagagagagctgggagagctgctgggtctggcagaagcagccctggttaattgctcaccctccaggaggaggtggggaatgggggttcacacacacccccagccagctctcagagaggtcgtttggcctcaagtccccaccctctgcccccggctctgggctggatgcctggcctctgcctcctgagggctctcctcctttctctgggcacccccaggggacaaggcccgtttcctctgggcccatgtagactctgattctatcccaggctggggtccttacttgctgtgtggccccggcaagtccgtgcccatctccaactcagctttctcacttgcactgctgctgctgctcctgctaagtcgcttcagtcgtgtccgactctgtgcgaccccatagaccacagcccaccaggctcccccgtccctgggattctccaggcaagaacactggcgtaggttgccatttccttctccaatgcatgaaactgaaagtgaagtcgctcagttgtgtccgactcttagcgaccccatggactgcagcctaccaggctcctccatccatgggattttctaggcaaaagtactggattgggttgctattgccttctcctcacctgcactgcaggggagttgaaaaggatgatctctgtctgtctagcttccaaggaggcctccgactgttacctccggtattcacacccctgtgtaatcactgaagagactgaatcagtgtaacagatggagcggcgtgaacgtgagagtagggctcccgaagcacaggacagggaggctacgctgctcctctgatcacaggctctggggaccccagtcgccatgtggtaaggatactcaagcagcccagtggagaggaacggaggcttcccaccaacaaacagtaccaaccagccaggtgagggggttagtcaccttagaagcagatcctttatccccaggcaaatctgcagatgaccccagcccctgaccccagccccagccaagatcttggctacatgagagaccctgagccagaaccactcagctaagccaatcccaagactcctgatccctagaagctctgtgagataataaatgctgattgttcaaagccacaaagttttaaggttactggctacacaaaataaagtaatgaatatatttccaccttctgctgcctacccccagagttctggtctgaatcattggtctttcagaaaagccctaggttggtgtcaccaatgtcaaactcaactaagttcagggaggagctcatcatatccccccccatctacttccacaattagccattgccaacggacgtcctctagaatcaaagacagatacgtggtgtgcattattgttcagtcgctaagtcatgttcaactctgcagctccataaactgcagcgtgccacggttccctgtccttcaccatctcccagagcttgttcaaactcatgtgcattgagtcagtaatgccatccaaccatctcatcctctgtcacccccttctcctcctgccctcaatctttcccagcattaaggtattttctaatgaatcagctcttcgcttcaggtggccaaaggattggagcttcagcttcagcatcagtccttccaataaatattcagggttgattttctttaggattgactggtttgatctccttgcagtccaagggactctcaagagtcttctccagcaccacagttcgaaagcatcaattctttgctgttcagccctctctgtggtccaattatcacaaccatacatgactactggaaaaatcatagctttgactagacagacctttgtggtgtgcattattgccttccttatcccagcattcagccactgacaaacttggcctcttttatctcctgcccatctctagaatcctccctctctttaccaagcctaggtgccctgccccagctcaggccacaccctctcttgccagttcagcggctcctctctagtctccctgcctccatccttgctgctcttaccacccatccatcctccacactggccgctagagggagggacttcctaaaacatagatctgatcatgatgctcacctgctcattaatcttccatggctcccctgttgcctaaggcccgaactccttggcctggctttgaaggccttttttcatctgcccctaccccttacctctccatcctcatctctagtttttctttgtctcagtgttccattgatactgagccacctgcaattcttggaacacaagagtttcatacttccacacctttgctcacacagttctctccacctggattcccctccccttctttacctggaaaattcctactaatctgtcaagccctagccgtctgattctccgtgaggagctggtctctcactgcatcttattggactacaacaaactgtttacatgtctattcacccacaaagtgacaacctccaaagcaggatgtctttttcatctctatattcctagtaccttgctcagtcccagcatacagaattccataaagttcttaaaatggaagacctttagattgaactttaaggtcaactcatttaaaaatcattttggatgggaacacctctaaaaggtattacagactctcctacctttttaaactagtttatgggacatgattgaaccttgctcgagtgtatggtttatgtcagtacaaaccccgggtttttcagaaggagccttggaggtcatccaatagaggaaggacctcaggtctggaaagatcacgtgacttgcccaaggactttgcatgacgaacgttaatgaacatctgagctgcaagacggtgatctctttgctttgatgaaggatgtcaagcccttgccttgccacggcactaaatggcccctttagtcaatgtctttaaggtttctgtatgttttagaatcatcccatttcagcactaggccagtgtacctggcccccactttacccctctagtttgttacttctggtccactggaggcaggaggatcaggtaaccaaacttgatggaatcacacggaaaggaagagttacagccctggcctgagacctgggagcactgctcctcgggggagtgtggcgggacgatgggactttgtggccctcctgcctctgctgtgccccagatatgacagttgtcgtgaggagagactgaaggcttgggctggttctggcggagggaagtgtcagcataaccaagagatcctgcaggcaattcactcccaggtagatgactccacagggaggacaaagaggcggatcctggaccctgggctccataagctcccttcccacactccctcatcagagacaaagtgcatagtgcaagaggcaaaaggaagcagggcctctggggtggggtggggagagggggactggataggtgggaatagctctgtttatcttatccagcgagcaaacgaatgagggtggaacaggaagcaatgaactaagagatgaggattctagtccagcttccactactaactggatgcatgtcaaggggcaactcaactagtcaatctaggtgtccgtttcagaatctgtgaagtggggatgtgtgtgaaagttttagtcgtttagtcatgtccgactctatgccactccatggactgcagcctgccagactcctccgtctatggaattctccaggcaagaatactagaggcggtagccattcccttctccagggatcttcccgacccatggatcatacccacatctcccacattgcaggcagattctttaagatctgagccactagggaagccctgaaatggggataattcctacatcatggggttatagtgggattaacaaaaataatgtaaaaaagaacttagttctaaagtgctgctcaagggaacatggccttcattcacgcattgcacaaacacttactgattacctactatatgccagctgttccaggaactggggctgtggccatgaacatgacaaagcccaggtcccatggagctgactttctggggcgggagacacataaatgaataataatgtactaatcagtatctcaataaaggacagaaacggtatggacctagtagaagcagaagatattaagaagcggtggcaagaatacacagaagaactgtacaaaaaagatcttcatgacccagataatcacgatggtgtgatcactcacctagagccagacatcctggaatgtgaagtcaagtgggccttagaaagcatcatgacgaacaaagctagtggaggtgatggaattccagttgagttatttcaaatcctgaaagatgatgctgtgaaagtgctgcactcagtatgccagaaaatttggaaaactcagcagtggccacaggactggaaaaggtcagttttcattccaatcccaaagaaaggcannnnnnnnnnnnnnnnnnnnnnnnnnnnnnnnnnnnnnnnnnnnnnnnnnnnnnnnnnnnnnnnnnnnnnnnnnnnnnnnnnnnnnnnnnnnnnnnnnnnnnnnnnnnnnnnnnnnnnnnnnnnnnnnnnnnnnnnnnnnnnnnnnnnnnnnnnnnnnnnnnnnnnnnnnnnnnnnnnnnnnnnnnnnnnnnnnnnnnnnnnnnnnnnnnnnnnnnnnnnnnnnnnnnnnnnnnnnnnnnnnnnnnnnnnnnnnnnnnnnnnnnnnnnnnnnnnnnnnnnnnnnnnnnnnnnnnnnnnnnnnnnnnnnnnnnnnnnnnnnnnnnnnnnnnnnnnnnnnnnnnnnnnnnnnnnnnnnnnnnnnnnnnnnnnnnnnnnnnnnnnnnnnnnnnnnnnnnnnnnnnnnnnnnnnnnnnnnnnnnnnnnnnnnnnnnnnnnnnnnnnnnnnnnnnnnnnnnnnnnnnnnnnnnnnnnnnnnnnnnnnnnnnnnnnnnnnnnnnnnnnnnnnnnnnnnnnnnnnnnnnnnnnnnnnnnnnnnnnnnnnnnnnnnnnnnnnnnnnnnnnnnnnnnnnnnnnnnnnnnnnnnnnnnnnnnnnnnnnnnnnnnnnnnnnnnnnnnnnnnnnnnnnnnnnnnnnnnnnnnnnnnnnnnnnnnnnnnnnnnnnnnnnnnnnnnnnnnnnnnnnnnnnnnnnnnnnnnnnnnnnnnnnnnnnnnnnnnnnnnnnnnnnnnnnnnnnnnnnnnnnnnnnnnnnnnnnnnnnnnnnnnnnnnnnnnnnnnnnnnnnnnnnnnnnnnnnnnnnnnnnnnnnnnnnnnnnnnnnnnnnnnnnnnnnnnnnnnnnnnnnnnnnnnnnnnnnnnnnnnnnnnnnnnnnnnnnnnnnnnnnnnnnnnnnnnnnnnnnnnnnnnnnnnnnnnnnnnnnnnnnnnnnnnnnnnnnnnnnnnnnnnnnnnnnnnnnnnnnnnnnnnnnnnnnnnnnnnnnnnnnnnnnnnnnnnnnnnnnnnnnnnnnnnnnnnnnnnnnnnnnnnnnnnnnnnnnnnnnnnnnnnnnnnnnnnnnnnnnnnnnnnnnnnnnnnnnnnnnnnnnnnnnnnnnnnnnnnnnnnnnnnnnnnnnnnnnnnnnnnnnnnnnnnnnnnnnnnnnnnnnnnnnnnnnnnnnnnnnnnnnnnnnnnnnnnnnnnnnnnnnnnnnnnnnnnnnnnnnnnnnnnnnnnnnnnnnnnnnnnnnnnnnnnnnnnnnnnnnnnnnnnnnnnnnnnnnnnnnnnnnnnnnnnnnnnnnnnnnnnnnnnnnnnnnnnnnnnnnnnnnnnnnnnnnnnnnnnnnnnnnnnnnnnnnnnnnnnnnnnnnnnnnnnnnnnnnnnnnnnnnnnnnnnnnnnnnnnnnnnnnnnnnnnnnnnnnnnnnnnnnnnnnnnnnnnnnnnnnnnnnnnnnnnnnnnnnnnnnnnnnnnnnnnnnnnnnnnnnnnnnnnnnnnnnnnnnnnnnnnnnnnnnnnnnnnnnnnnnnnnnnnnnnnnnnnnnnnnnnnnnnnnnnnnnnnnnnnnnnnnnnnnnnnnnnnnnnnnnnnnnnnnnnnnnnnnnnnnnnnnnnnnnnnnnnnnnnnnnnnnnnnnnnnnnnnnnnnnnnnnnnnnnnnnnnnnnnnnnnnnnnnnnnnnnnnnnnnnnnnnnnnnnnnnnnnnnnnnnnnnnnnnnnnnnnnnnnnnnnnnnnnnnnnnnnnnnnnnnnnnnnnnnnnnnnnnnnnnnnnnnnnnnnnnnnnnnnnnnnnnnnnnnnnnnnnnnnnnnnnnnnnnnnnnnnnnnnnnnnnnnnnnnnnnnnnnnnnnnnnnnnnnnnnnnnnnnnnnnnnnnnnnnnnnnnnnnnnnnnnnnnnnnnnnnnnnnnnnnnnnnnnnnnnnnnnnnnnnnnnnnnnnnnnnnnnnnnnnnnnnnnnnnnnnnnnnnnnnnnnnnnnnnnnnnnnnnnnnnnnnnnnnnnnnnnnnnnnnnnnnnnnnnnnnnnnnnnnnnnnnnnnnnnnnnnnnnnnnnnnnnnnnnnnnnnnnnnnnnnnnnnnnnnnnnnnnnnnnnnnnnnnnnnnnnnnnnnnnnnnnnnnnnnnnnnnnnnnnnnnnnnnnnnnnnnnnnnnnnnnnnnnnnnnnnnnnnnnnnnnnnnnnnnnnnnnnnnnnnnnnnnnnnnnnnnnnnnnnnnnnnnnnnnnnnnnnnnnnnnnnnnnnnnnnnnnnnnnnnnnnnnnnnnnnnnnnnnnnnnnnnnnnnnnnnnnnnnnnnnnnnnnnnnnnnnnnnnnnnnnnnnnnnnnnnnnnnnnnnnnnnnnnnnnnnnnnnnnnnnnnnnnnnnnnnnnnnnnnnnnnnnnnnnnnnnnnnnnnnnnnnnnnnnnnnnnnnnnnnnnnnnnnnnnnnnnnnnnnnnnnnnnnnnnnnnnnnnnnnnnnnnnnnnnnnnnnnnnnnnnnnnnnnnnnnnnnnnnnnnnnnnnnnnnnnnnnnnnnnnnnnnnnnnnnnnnnnnnnnnnnnnnnnnnnnnnnnnnnnnnnnnnnnnnnnnnnnnnnnnnnnnnnnnnnnnnnnnnnnnnnnnnnnnnnnnnnnnnnnnnnnnnnnnnnnnnnnnnnnnnnnnnnnnnnnnnnnnnnnnnnnnnnnnnnnnnnnnnnnnnnnnnnnnnnnnnnnnnnnnnnnnnnnnnnnnnnnnnnnnnnnnnnnnnnnnnnnnnnnnnnnnnnnnnnnnnnnnnnnnnnnnnnnnnnnnnnnnnnnnnnnnnnnnnnnnnnnnnnnnnnnnnnnnnnnnnnnnnnnnnnnnnnnnnnnnnnnnnnnnnnnnnnnnnnnnnnnnnnnnnnnnnnnnnnnnnnnnnnnnnnnnnnnnnnnnnnnnnnnnnnnnnnnnnnnnnnnnnnnnnnnnnnnnnnnnnnnnnnnnnnnnnnnnnnnnnnnnnnnnnnnnnnnnnnnnnnnnnnnnnnnnnnnnnnnnnnnnnnnnnnnnnnnnnnnnnnnnnnnnnnnnnnnnnnnnnnnnnnnnnnnnnnnnnnnnnnnnnnnnnnnnnnnnnnnnnnnnnnnnnnnnnnnnnnnnnnnnnnnnnnnnnnnnnnnnnnnnnnnnnnnnnnnnnnnnnnnnnnnnnnnnnnnnnnnnnnnnnnnnnnnnnnnnnnnnnnnnnnnnnnnnnnnnnnnnnnnnnnnnnnnnnnnnnnnnnnnnnnnnnnnnnnnnnnnnnnnnnnnnnnnnnnnnnnnnnnnnnnnnnnnnnnnnnnnnnnnnnnnnnnnnnnnnnnnnnnnnnnnnnnnnnnnnnnnnnnnnnnnnnnnnnnnnnnnnnnnnnnnnnnnnnnnnnnnnnnnnnnnnnnnnnnnnnnnnnnnnnnnnnnnnnnnnnnnnnnnnnnnnnnnnnnnnnnnnnnnnnnnnnnnnnnnnnnnnnnnnnnnnnnnnnnnnnnnnnnnnnnnnnnnnnnnnnnnnnnnnnnnnnnnnnnnnnnnnnnnnnnnnnnnnnnnnnnnnnnnnnnnnnnnnnnnnnnnnnnnnnnnnnnnnnnnnnnnnnnnnnnnnnnnnnnnnnnnnnnnnnnnnnnnnnnnnnnnnnnnnnnnnnnnnnnnnnnnnnnnnnnnnnnnnnnnnnnnnnnnnnnnnnnnnnnnnnnnnnnnnnnnnnnnnnnnnnnnnnnnnnnnnnnnnnnnnnnnnnnnnnnnnnnnnnnnnnnnnnnnnnnnnnnnnnnnnnnnnnnnnnnnnnnnnnnnnnnnnnnnnnnnnnnnnnnnnnnnnnnnnnnnnnnnnnnnnnnnnnnnnnnnnnnnnnnnnnnnnnnnnnnnnnnnnnnnnnnnnnnnnnnnnnnnnnnnnnnnnnnnnnnnnnnnnnnnnnnnnnnnnnnnnnnnnnnnnnnnnnnnnnnnnnnnnnnnnnnnnnnnnnnnnnnnnnnnnnnnnnnnnnnnnnnnnnnnnnnnnnnnnnnnnnnnnnnnnnnnnnnnnnnnnnnnnnnnnnnnnnnnnnnnnnnnnnnnnnnnnnnnnnnnnnnnnnnnnnnnnnnnnnnnnnnnnnnnnnnnnnnnnnnnnnnnnnnnnnnnnnnnnnnnnnnnnnnnnnnnnnnnnnnnnnnnnnnnnnnnnnnnnnnnnnnnnnnnnnnnnnnnnnnnnnnnnnnnnnnnnnnnnnnnnnnnnnnnnnnnnnnnnnnnnnnnnnnnnnnnnnnnnnnnnnnnnnnnnnnnnnnnnnnnnnnnnnnnnnnnnnnnnnnnnnnnnnnnnnnnnnnnnnnnnnnnnnnnnnnnnnnnnnnnnnnnnnnnnnnnnnnnnnnnnnnnnnnnnnnnnnnnnnnnnnnnnnnnnnnnnnnnnnnnnnnnnnnnnnnnnnnnnnnnnnnnnnnnnnnnnnnnnnnnnnnnnnnnnnnnnnnnnnnnnnnnnnnnnnnnnnnnnnnnnnnnnnnnnnnnnnnnnnnnnnnnnnnnnnnnnnnnnnnnnnnnnnnnnnnnnnnnnnnnnnnnnnnnnnnnnnnnnnnnnnnnnnnnnnnnnnnnnnnnnnnnnnnnnnnnnnnnnnnnnnnnnnnnnnnnnnnnnnnnnnnnnnnnnnnnnnnnnnnnnnnnnnnnnnnnnnnnnnnnnnnnnnnnnnnnnnnnnnnnnnnnnnnnnnnnnnnnnnnnnnnnnnnnnnnnnnnnnnnnnnnnnnnnnnnnnnnnnnnnnnnnnnnnnnnnnnnnnnnnnnnnnnnnnnnnnnnnnnnnnnnnnnnnnnnnnnnnnnnnnnnnnnnnnnnnnnnnnnnnnnnnnnnnnnnnnnnnnnnnnnnnnnnnnnnnnnnnnnnnnnnnnnnnnnnnnnnnnnnnnnnnnnnnnnnnnnnnnnnnnnnnnnnnnnnnnnnnnnnnnnnnnnnnnnnnnnnnnnnnnnnnnnnnnnnnnnnnnnnnnnnnnnnnnnnnnnnnnnnnnnnnnnnnnnnnnnnnnnnnnnnnnnnnnnnnnnnnnnnnnnnnnnnnnnnnnnnnnnnnnnnnnnnnnnnnnnnnnnnnnnnnnnnnnnnnnnnnnnnnnnnnnnnnnnnnnnnnnnnnnnnnnnnnnnnnnnnnnnnnnnnnnnnnnnnnnnnnnnnnnnnnnnnnnnnnnnnnnnnnnnnnnnnnnnnnnnnnnnnnnnnnnnnnnnnnnnnnnnnnnnnnnnnnnnnnnnnnnnnnnnnnnnnnnnnnnnnnnnnnnnnnnnnnnnnnnnnnnnnnnnnnnnnnnnnnnnnnnnnnnnnnnnnnnnnnnnnnnnnnnnnnnnnnnnnnnnnnnnnnnnnnnnnnnnnnnnnnnnnnnnnnnnnnnnnnnnnnnnnnnnnnnnnnnnnnnnnnnnnnnnnnnnnnnnnnnnnnnnnnnnnnnnnnnnnnnnnnnnnnnnnnnnnnnnnnnnnnnnnnnnnnnnnnnnnnnnnnnnnnnnnnnnnnnnnnnnnnnnnnnnnnnnnnnnnnnnnnnnnnnnnnnnnnnnnnnnnnnnnnnnnnnnnnnnnnnnnnnnnnnnnnnnnnnnnnnnnnnnnnnnnnnnnnnnnnnnnnnnnnnnnnnnnnnnnnnnnnnnnnnnnnnnnnnnnnnnnnnnnnnnnnnnnnnnnnnnnnnnnnnnnnnnnnnnnnnnnnnnnnnnnnnnnnnnnnnnnnnnnnnnnnnnnnnnnnnnnnnnnnnnnnnnnnnnnnnnnnnnnnnnnnnnnnnnnnnnnnnnnnnnnnnnnnnnnnnnnnnnnnnnnnnnnnnnnnnnnnnnnnnnnnnnnnnnnnnnnnnnnnnnnnnnnnnnnnnnnnnnnnnnnnnnnnnnnnnnnnnnnnnnnnnnnnnnnnnngcaagaatactagagtgggttcccacgccctcctccaggggatcttcccgacccagagattgaacccacatctcctgtgtctcctgcactgcaggtggattctttacctgatgagccactagggaagctcctggtgtctcaggaggtaaagaatctggctgtaacgcaggagacccaggttgtaggttgggaagatcccctggagaagggaatggctacccactccagaactattgcctggagaattccatggacagtggagcctggtgggctacaattcttggggtcacaaagagtcgaacatgactgagcaactaacacttttcactttcaccagaacagaccggccctgcctcaataaaagatgagactctttcccagtcatagcaagttcctgaatttcagtccacgccttcaatcaaggctctagggacttttgttcattattttctttccttaagctatccagtgccattaaaagcaaacattccaccccacagtcctcagagtcctcctgccctttattcttctctgtggcacaggtcgtccaagcccctgatggcttgccttccatgggtacttcattttaggtgaccacaagggacactttaattagctgtttcagcactggggaccatgggcttctgggtctcctccctttgtgctagctgttatctcccagccttcagccctaactagggcaggagccaatcccagattcccaggattccctcggggtctgtgcctgcaccccaattacggcaccaagatttgtactaatcagggtacttgtttgcaaacaacagagagaaattctgtttgacatacactgaaaatacacaggcatcaggatgttcatcgaacctgtgcagaagccagaagaccaggcaggatccagagagacacagacgaggtcttgccacaggaatgatacctcaggagctgctccgggggtgtcgccaccaacctcctgtcccaccacaatgatcctcagtgaccctgcaccttaggccactctttctgttgagcagtcgagtgtgagtgtgtgtgtgtgtgtgtgtgtgtgtgtgtaggtgcatgcatgtaggtaggaagagaggaggaccagcgagtagctagctctcttatgggatttgtagggcaattagcactaaattagacgtgacctatgccaggctgaaatcccatctctaccatcaacttgacccagttgtgttatcttgagcaaatctctgaccatctctagacgggcctcagtttcatcatctgggaaatgggaacaatatccattcttccagcctcactgacgtgttgtgctcccacaccctccttttctcatggataggacttagttcaatgtataacgagacatttatttgtgaaggtaccactaatgttcctccagtagacggtaggctctgtgaggtcaaggacttcatctatctgcttagtgctgttaccccaacacctagaaaattgcatgaaatgtagcatgggcccaagaaatatttgaatgaaagactaaacaaggtaaaggatcaggaaggggatttgtaaatcgtcaagggccgcacatgtgtaagtgctggtgctttggagccagagagaccttgaaagtgaaagtgaaagtcactcaatcatgtttgactctttgtgaccccgtggactgtagttcatggaattctccaggccagaatactggagtgggtagcctttcctttctccaggagatcttcccaacccagggatagaacccaggtctcctgcattgcaggcggattctttaccagctgaaccacaagggaagcccaagaatactggagtgggtagcctatcccttctccagtggatcttcccaacccaggaatcaaaccggggtcttgtgcactgcaagtggattctttaccaactgagctatcagggaagccctgctgctgctgctaagtcactttagtcgtgtccgactctgtgtgaccccatagatggcagcccaccaggctccccggtccctgggattctccaggcaagaacactggagtggggtgccatttccttctccaatgcgtgaaagtgaaaagtgaaagggaagtcgctcagtcgtgtccgactcttctcgaccccatggactacagcccaccaggctcctccgtccatnnnnnnnnnnnnnnnnnnnnnnnnnnnnnnnnnnnnnnnnnnnnnnnnnnnnnnnnnnnnnnnnnnnnnnnnnnnnnnnnnnnnnnnnnnnnnnnnnnnnnnnnnnnnnnnnnnnnnnnnnnnnnnnnnnnnnnnnnnnnnnnnnnnnnnnnnnnnnnnnnnnnnnnnnnnnnnnnnnnnnnnnnnnnnnnnnnnttgtgtcttcttttcctctacacttaggggaagtcacccagtgtccccatgagttcccgccatcacctgcacaccagcctcagcaggggccccctgcccaagactgtctgggagtcatctgccccaccccctccctccagctactccaggacttactccagaactgcagttacacctccttgtctggaacctcgggacctgacccaagacccagcctacaatggaggtttaggaaacaaatggataaatgaatgactctctgttttcaaaattataaaaccaatctctgtctttgcttgaggacagagtctgaagaaatgacctaaacccacagaaagatgcactaaaattagaccctaacagaaacttccccagtcgtgttatttactaagccctacaggggagagacagagacgagggaggctttccttcctcctggggaaaagcgaggggctagggagaggaagtgagacccttgggaaagtatacctccattggcagggagctcattacttgttgaaacaggctcctccattaccaacttccttcagcaaccagagtccactcagtcctcatgtttctgatccctacccttcacctctcccaccatcccctctctaaagagagtgtgactttgcagagctggcagccagcaagcctgccaccattcccaaaagaagacagaccttcctaacagtagtggagcaggctaactcagaaggtaatcaactcctcgatggtggaaatggacacagacctgccaagagatctgtctttgtaacacaacctcacttatgggagcactttaagcttaaccttctctcttggccatttgcgctgggttttgaagccatttttccaggtaaaagctgaaggaagggcattcaagacagaaggaatggcacgtatggaagcatagagatggaaaacggccccatgtttgcaaaaagacaaatcatcttgactttcaaggccggaatgtggggccccaatatttactgagcacagactctgcacagatgcaggggtaggacctggagagatactgcaaataagacaaacacacagtctccactctcatggaatttataatctagtgggggaacagaaaagaaacagacaaataagtgtgggcagtcttttcagatggttccacatgctgttaaaaaaaaaaacaggtgacacagtggagaacgactggtggttggggagcacctctctgagcaagtgacatgtgagctgagatctgaaagcagcaaagagatagtcacgcaaagagcaggctgaagaagttcctagctagaggccagcaagtgcaaaggccctgaggcagagacaaacttggaattacagagaaacacaggaggccagtgtggctgaagagtagggggagagtacctggtgctctgctggtctcccctgccccaatctctctcttctgcttggacactgggtctccaagcccagctgagtgttcagagcaagacactcactccctgctccccagtccccactgcttcaggatcctggttcattctggcagcaaatctctgcccatctcagtcagctctgcaaactcagcctgctgcatcctgcataagcagcccagcatctcagcccctcctcccccagccaagaccccagcacccactccaacctcaacccagaagccagggttcaagcctggtccaaaggggctccagtcaccaagctggatagccctttagacccaaaccaactgaggagccagctctggaggacagtgtgtggggcgggggggtgtcaggagcggcacattgttcggagatggcagagccagacacgagatcccagactagatagagctgggaacgaggaggggggctgggcttggcgttcctgggtggtgatgccatctccccggcaatggagggcggcaggcaggagcctcccattcccccagaggacttgtcctccctgctatctgatgagggagctgtcggttacaggaaggcaagactgttcacaggacagctccagggagcaggaaattaacccaccagccagagacagggggaggggggctgggcggggcaggtaattaaggggccctgcaattactgtgccttcaatctgggccagagttctcaggaaggggatggagatgctgctcagtcggaggccccagctgactctggcagggggcatcagccctgtctcacactcttccttccgtttccattcctgtctcccctgggccccatccctacctctgtccaaccacaagtgatccgctcattctcatctttgcacaactgttcctcccaccctaaaggcctttcccactcactcgatcctgcccttccatcggctcatgcaaaggactgttctccaagaagtcttcctggagcagtcatgtcggaagggattgctctgagctcacataacacagcccttttgtgttacgataagggaacagactcagagagggcaacgatcggtccagggtcacccagcagaatcaggactagaacctgagactcctgcatttgggactggattttttaccaccaccctgtgagctcactaaccgataaccagcccaggcgtcatcacatgccaaccacggacacagactgaggaccacagaagggtcaaggggcccgtcgcatttatccagcatctacttgctctggattgcggctggggattgggaatgctgtgaccagcagacacagacacagccctgcctttagggagtttaaggacccgccacaggatcacccagaggtatgttccaagataaactaagaagaaccttcaaaaaagaggccccaggctggtgaaaccttgtgacaaagacatttaacccaacctggggcccgagacaggcctctctggagatgctgggcctgggctgcaatctggagagtggaagacagcaactagatgaaatggagcagggaagaacgttccagacagggtgtctggcatgggcacagtccagcagaggaagtccagaatggctggagctctgagtgaagaggtagcctgagatccagcagggaggccatagggccccagcgatacaggactctggcttgggcatttgatctttatcctaaaagcactgcaaagccactgtagagttttcagcaagggaactgtgtacatagggaataccactggctgcagtatgaggaaagggttggaaggaaccagtgaaagcggggcctgccgagaggctcctccatagtccaggtgatggtggcggagaccagcactgtgccagcgggcagtcaaggaaggagtgttgagaagggatgtgttgaggatggaatctcccggggcagggctaggacaggggtgggggacaagctggggacggagtggagggagaggaaggagtcaaggtaaccccctccaggcttctggtttgtgcaatgagatgggggttaaccaccaagctgggggcagtgtgggaggaggggaaaaggctgagctgcagatgcttctgagagactggcgtccattggagctagagaccaggggtgagggggtaaggagacgccacctgggtcgtgtggtgagtgcaggcctgaagcagctactcggagccacaccttctctgtagctcctttagcacgacgggtgccgctgctcccactttccagaagaggaaactaaggctcagactggaaaactgcttacatagagttccacagtggcagaaccaagatctgccctccctgagtttttctcacttcaagctgcctcaggatgcctctctggctcgaacctggcccagaggagaaagcagagccacccacatacacagctgggactacagggagctttaagcatctgacaggcccttggtgggaagcttcccctgcagaggagaaaagggctaggaaggcagcctggagatgagcaagggccccacctccccatggtcagggccactaatctcacgctccttctgtgcattatacaaacttactctgctgggcccttcacacccaagaaggagtgctgttgctattcagtcgctcagcctgaactgataccccatggactgcagtatgccaggcttccctgcccctcactatctcccagagtttgctgaagttcatgtccattgcattggtgatgctatccaaccatctcatcctctgccaccctcttcttttgcctccaatctttcccagcatcaaggtcctttccaatgagttgggcttcacatcacgtggccaaagtattgctgctgctcccattttacagctggggaaagagaggcccagagagaggacagtcaaggtgagtttgtggcaaaatacagaaagccagggatgtctggtgccaggttcccagctcactctctccaaggactggaggggtttagtgagcagctaggggaggcagagagtgagaagccctgggcttaagggctacccagtccctcctatcccccatcaacccctcagtgggcctgggcctctggggtgcagacccgaggggatggggagaaggatggtattgagtctgccaggaagcttctgagagcctttgtggctacctgagcatccccactagcatctcttcactcttccacctgccctcacctccagagccaggcagcctcttgagcccaagcaggggaagggagaaggctgacagaggtctttccctgcccgcatcgtgcctgtctattcagttatcctcctgtcggggcctttgggggcagtcccgttggtgctggaccctctggtccctttgttcagaagagacctgaacaaaggggaccgagaccaagaagcagcagccagctcaggtggggagggaacaggaatcctgtggcccacaggagggtgactgctggcccagcctggagaaaccacacgctggagaaggccaaccctgtcctgtgaaccttgggatttgcaggtgtgatgggaagacccaactgcacagaagcagttgcttccctgcagaccccaagggatagcaaggagagggcagagcttagagggtcaaatatgtgtgtggggatgccgaggacaaggacgaagcagaaggggtcctggccagcagggggcgccagcgcaacagaaatccaagcaggtggtttgcaaggagcctgaaggccttgtctcaagtccggaggttaccagggctagagcatgatgctagagcacggaatgaagaggcacccactgatcagacctggctgttgaagcacgaccccagcacagggggcccggtatggtgtcataaataagagcccagccttcagaatctgcaaggacagatgagttggaatcctggttgctgctgtgcggccttaggcaagtcttttcctctctgatcttcagtccacctccataacaggaagatgctcattgcacttccagcctggggtcctggcgtgcagtaagtccccagtaaatggacaaagtgcttcataaaaaacaaagaatgcgttcagacgtcaggactggcaggaggatgcccacacccgccctccccccacccccagccactgacccagggtcctttaccttcccatacaggttggggtgggtacccacttccttcagagccagagggggttcagtgcaggaagaaggggcctcagggacagaatgccaggcaacgcaccagggatggagctgggaccttggccacttgacaggtttgcttcatttgctcaacaaagttatcaagcattcatcaagcacctgccccctggcaggctctgtaccaggcacagaagtatcaggtgagaaggcacacagacccaggcagtgacacctcctgctggccccaggcgggtggggccgggttctgcccctcctggcttgcgctagttggacacatcctggggccacttgagccacaaggccccgctactgcccaggtaagatgacctgtgactcagcagtcaaaggctcttgaaggctggaggtcagggagtgggctggcggcagaggtgggcatctcccactcttgtgctctcttccctgcaaaggccgctgcttgcagagactctggagctgacaaggcttggttcacatccaggctttctacataattcccagggcccctgagggagtcaatttctaccctctcagccccagatgccgctaggagaatacaggaaacactttaaatgatttactatatgatttctctttctctttcataaagaaagctcctctgctacaaactaaccctgtgaggttggtattggtacccagctatagcaaaggaaaggctcagagaagttaagtgacttgcacaagatcacacagtatatatcaggcccatcaaactccaaagcctatattccttctagagcacatactagctcagggcagattgattgttccttcttgataatgggctcatctgagaccaaaagaatcctcagttcgcagaaagctgtcagtgatgaagggcccttctggggtcctgacccccaccatcagaagcctaaggtcttggttgataaccctggcactgttgcagactggatgacctcaggccaggtcaaggtccaaagctcataccaagccccaggctcccgctcctgaaatgcaggggaggagttaagcattggacacagcattcctggcctttctctgcttctcacctccacctgctccatcacacagactgacccccaggcttccctctccagggaatccatgagactagcccacacaaacatggcaagaagctgctctgctgaaaggtgctgcaacttctcagaagcatagtgcctgcccggggctgaggctgcaggagctcagctgagatgccttcctgatgtatcttgagtttcccctgaggatttcctgcaggtcctcgaagcagaccttccagctgaggaagctctgcatctgggaacacaagagaccctgcgtctgtctgggcagagagacgcagtgggctgaagtcttccctagcctgttctgggcttatgtcttggtcgctggcactgctggattctcctggccacaaaggaggtgagaggctcagctgaaattgtaagggactcccagacctgagatgctccaattgtaattaaattccctgatcaagccatcagataaactggattgccttcacaagagcacagaatcagccagctataatgccagacccacagctcctcttccccagcctgcaggatgatccagcagggggaaggtactgtcattaaaaaggactttggggagagaacaaggaagaatcagatgtggaagagaactgctaggacgccccacagccaagcctgaggtcagacggcaagtgcccgggaaggaattcctggcaagcctgcgtcctcatgtttcaccaagacgtccaatgtgcctcagagaaggacaacatcagtggctaaacatctcttttccaggtgggatctggcagctggaaaacctgtgctgtagccagagtggtaccctgggttcttgtttgcatccggagcagttttagttgcataaaaaggaaggtgtgtgtgtatgtgtgcgtgcgtgtatgagggtgtatttccccctcagtataacattattgctggttaacaggataaattgggaaaatgcaactacaaagcgaaaccacacagccctgtctcccccaacactttcagccttctagtgacttctgtttgtcctcgggctttagaacactctctgctgtctccctcagcacagttaagattttaaagtgagcattttcctctcactctgagcccttcctctgcccaaaggctgctccctggttcacagtcttaaggtcgtttccatcttctgctattctggatacgcctaccacaggtgcctgcatgtgtgggaagcttttcccacgttctgaactatcccctttggatgaaggctctccatctgaagatcctctttgcaggttgattcttggagcctgtgagagctggagaccatgcctcccaacctgggagccctccacgttctttgtccccaaaatggccagagggcatacctgcgagaatttcccttctgctcaaggcccacagggatgcgggtgtcaccccagtggccctgaaaaggggactgaggctcctgaggagacaggttctcgtttgcttcatgtatgaaaaagcagcccatcagctggagatttctctttggggttcacggtcagacgcatgggggtcttgtctctgtcactggctagctgtgtgactttgggcaagttacttcccctctctgagcctgtattctcatctggagagtggagatgataatggcacctacttttctcgagtggctgtacacatgaagtgcaatgatgcaggtaaggccttcagcccagagttggctacagcactgtaagtggttaacacattggaaccattgttgttactcagccgctaagtcgtctctgactctttgtgaccccatgaactgttggttggaaccacagatggctactttagctgcatagccctttcagtccaaaaggtgtcctctgacttctccgggtgttcatttctccagggctaaatgggactgaggatgatttctgcctcccagagttgccagggagcaaatgagcccactgggataagaaggaactccttgtcaactgcagagcgcatggtggtcatttactttgcttgttgttggaatcttctggtgggaactcactacctatggatggggccccaggggcagatctggctaatacagcctcctccaggaagacaaagcctgtctctagctcttcacaagctggctccaacttccacagaaaccccccatcccaacccccgggatctgggttcacacagcgctgaggtccagccctggatgcatcactcccatctgtatgtccacgcccactggcccttctgtccctcaggcttctctctgtaaagtggtggctccccttctgccttcttgttagacagagcaggtgagctcacagtgcaccccgtgggtgctcattcttcatacatttccttttccccgaagatccacaggccagagggccccttctcccagctgcctgggtacatctagaatcaccttcctggtgctctgcccgccatgcctgatgtgaccagagtgggggccaggctggtctgtgaaggtcagaggtgtggatgggctcggggtccacagagagggggagagcaaatgagacccagacatgccagcttgtccaggccctcccccaggtgaaggtgtagcctgggatgagagagctcttaggggggcggcaggaggcgggatacacagccctgccctgtaccagagctctcacagtggagagctgtggagtgtgtgagtgtgtgtgtgtgtgtgtgtgtgtgtgtgtgtgagtgtatgtgcacccagttcagtcgctcagtcgtgagcgctctgactctttgtgatcccatggactgcagcacgccaggccgtcctgtccatcaccaattcccggagttcactcaaactcatgtccattgagtcggtgatgccatccaaccatcttattctctgtcgtccccttctcctcccgccttcaatctttcaagcatcagggttttttccagtgagtcacccacctgcaattataaaaccagatgcagtcaggaatgtttcaggagtgctggggggctgtggcagaggtgtgggcagttgcccctggggttagggtgtggaggcagaggtgggcttctggaggagggcatacctatctatgggagccggtgtcttccagggccctgagaagcccctcccgacactccccttggtggtggctgcacagctcccgcccagaagccagaaactgaccggaagggcttaaggcagtctagactccctcccaaggagcccgacctggcctgctcctacctcctgaccctacccccatcaccttaccagagcctgggggccctgggagtgtggtcagggagctctccccacacccaatggccagggaccacgggggagaccggaggcaagacccaagaaggcaggcatgggtgaaagtcaggaagcccaggacccaggctggtcttcgtgggcgcctcctgcagacctggcagcctctatgcctgaaacctcacagcaccttccaagggcggtgttgtcatgacccccatcttacagaggaagaaactgaggcccgcagaagtgacagaaccattctcccaagccagcgctgagccttgagccccatctgtgacagagtgtggcacacagagcccctcaccatgacgctgctgtgggccagcttgcgagtcagtgtgcccacccctccccccgaccctgtaaggcaggcggcttcagctcccactaaacaaacaggaacaagaccccccaggggcactgccctctcggagtggagctggctgtggcaagtgaggactcagggcttttattgccatttcagacacacaggaaggtcaaagcagacagaggggatggccgcagaggggcctggggtctccccactgggatgcctcagctttgaccccacccataaggacagccatgtgcccttctcaaccaggagggcaggtgtgggaggcctccaggacatgagatgggtcagcagacaccacctggcctgatgagcaggtccacccagggtgacctcggcctggcagtcacagcccagtgccaagaggaaggcctgggctcgctggcatttccagaactgccaggcaccagggtgggggcctagggttggtacccatcacagctctcagctaatggctgagatgtcaatccaccctccaaagtcggtccaaaataacttaattagcttgaaagagctgctggcagcctgccaggatggggtgggggaagggtagcaggacgagggccccccaacactgcagggaagaaccttgacaggaagacaagagcacccccattctgtggactgtaccctttcctcatcacagggactcgacccaccatggctctgccaggtccagccaactgagcccactggacagatgaggaaactgaggctcagagggggccaggatgcgctctgctgtattcatggcagatgggcactttgaaagtggggtgatgctacttgggggcaggaaaagttcagccctagaaaagctggtggggtctctagggagagagattaaggtgccagcaacgtaccatcaagccagagggatcccaggttgacatcggaagggacttgaggctgcaggaaaggacctgagcctaatctggaagaaaagagtgtgtggcatgaggcagtatccaccttgagagtcccagcgctgggggtccttgcccctctggcagagggttttagccagagccaagtctctgatagggtggcacctaggatcccctgctccctgcagcccccaggacactgggagcccaggcatggcggtgatcgggtgcgatcagggtgagacagacacacagccactgccctccagaccctgatgctgccctgtcagtgccaggctgggcactgccccaggatcacaggcaagggatggctgtgtgtgtggcagcccagagaggaacatgggacgcccagtgagctggagctctgccccaggtgtctgctccaaggctgagctcactactggtcccactggacacttgctcctcccacctcagagaatacactccgtcaaccacccaggttcccaagtcagacactggctgtctccctcctgctcaccccacccccagtcctgcccaagtcacctcccgaacttttgtaatctatctatcctgcaccctgtcccccatcccacccaatccagaccaccactgtccctctggatcgctgccaagtccttgtcacccatttctctggtctgcacactattctctctgtctctctctcacatgcatgtgccccatgaattatcaagggaatctttccaaaactcaagttcaaccaggtcagcctcattgccctccccaacctggccttggagactggggggattttcccactcacctcactgaggttggaacagagcaactgaaaccctgggctccagatcagccaggtctgggtctgcatcctgggtgggccgtttggtgactgtgtgatcttggatgagtcacaccaccttcctgagctctttcctcacctaggaagcaaggctgccacgaccttcatcaagaagaccccatggggcaccagggtggggccatgctgagcgcccggctcagagcagccacaccacgtggcaccaacgggcaccggccagctcccggctgcctctcaacacccgcctcacgtgctgcaggctgtgacctgacccggcagctggtcctccctctggctccaagagccccgtaacaccttgctctccacctatcggttctctggcctgtctctacctgtgagcaggagtagagcctgggacaggctcgatttacatttgatgaatgaatgaatgcagtacgagtgtctacagagggacacggccacgtagagaggcgcacaacacacacagccacctgcggctcagacgggctgagggccagagggggcccctaggttggtccattattacacacccctcggtgcagcccagctcagcttgagcctaagaagaaagctcaggacctgttttctgagggtccacgagggtgtgtgccctgcctccatcacgaggcatctgagcctaccacactcgggactacaaggagcagcccagggggccacagcacccccctgggcagggctgcctaaagtgggggtgcggggtggagtggtggctgccagctggcgagcgcctgggcctggcagtgccgccgatcgcccactcgcaccagctgttagtttccatggcctgcccaccagctagccaggatgctgggcccgggctgccctggggtgtcctgccaggaagaggcagcctctaggagggtggcctgggcagaggggagggcagaggaggggcaggggaggatgaggatgccaggctggaggaggccagggccaccctccgctcacagtgtggcccggaacaggctgccgcacttccagcgcctcaggcgcctcttctgggcagtccatgaggggccggaggtggggatggtgcccagggctcctccctccgctcaaaacacccagcaacagggattctggaccctcgggaggggaggtgctccgaggtctgcgaccacaagagggcgcccgagcctcaccttgcagggagccaaggcctgaggcccgcggtggagctgtgcctgggagagggcctgggagctgggactgaatccctgggcgtggcatgcagctacctgcgtccattctcaggcaagaccccatccacactttagctcttttttcaactgatggcaacactacctgcttcagtatacgtctgcagagtaagcgcaggaacacgctgctgctaagtcgcttcagtcgtgtccgattctgtgcaaccccatagacgacagcccaccaggctcccccgtccctgggattctccaggcaagaatactggagtgggttgccatttccttctccaatgaatgaaagtgaaaagtgaaagtgaagttgctcagtcgtgtctgactcctagcgaccccatggactgcagcctaccaggctcctccgtccatgggattttccaggcaagagtactggagtggggtgccatttccttctccaggaacacactaattgaatgataacggtgatgtagtattttaccgatgaagagaatggactcagagaggtttagtgatttgcctaagtcacacagcagtaggcatggagcaagttattccctctggtgctgggtgctggcagagctttggaaagagtcctggcaccaactcacagggggttagcagcactcaagtcctcagggtagggaccaagcctgattctggctcccccaggtcaccctgtgccataaagaccagacccttttctgggcaattacattaatgaaaagaggtcccagctgtgagccctttacacacccatgaggcatcctcgtcctctgactcacagatgaaggaggaaggcatgagagaagttaagaacttgccagaggccacaaagcttagttccagtactttggccccagaatccaccctcccctcaccatgctatgtcctggggaaactgtttttcccaaaggagcttctggccacctccgtccctctcctgttcacccaacagctttcccacctattcagttggggcagaggtgaacaccaggcccggccccatggaccgaccaccacccaaggggagacagacaaggtgcacatgactcattcagggccggagggcccctaaccaatcaggggtgtcagggtcttctgtggggaggcaaccactgagctgagttgcaaggaaaaaatgtagcacaatggcccttgctggcctcccattctgggcccagggggagctcgtgagttgggagaaactggccctgtgtgggtaggaggagtgggcaccccaagggcgagtccaggctggttcccagcaccctccagcacctggtcatcacaaagtcatggtgggctcatcaaggaatcaccactgggttgtgattggttatgggtgttcatggagccaagccctccaccagccttcccgcctttctctcaggatgggtaccccctagggcttcctcgattctatggggaccagagttggcggggtcaccaccctctgggtacaccgggcacagaccattgggccaccaacgcagcacctggagcccagagctcagagtctgagcagagcctggctggagggattgggggcaccagccagggtcccagcctgctgccttttgcatcaccagcctggagcccagcccagggccggcacctgtgcctcaaggcaccttgaggacctaactgcgcccctctgagaccctcttcccctaatggggcagtgaaagcacagccagccccagtgctccctgaccctcctggtctctcagggcctcctgtgtggttctagaagcaggactcaggctgtggcagccacctctctccaccagtggccaccgacactgaggtgcagagggagcctgggggctgtgaaggaggctgctccccctcatcgtgccagcagtggtgagaatcagacttccccgttcaaggacccccagctgatgttctttgtacccctgtgcccagccaccccctgcccctcagttctggggtccgtcagcaccaacagccctctcctcctctgcactctcccagccatccccaccccggacattgcctgcccccagaaccgccccctgatatttcccccctcccacccaggactggcttctctgtccaccatcctccaccctccctgttgggctggcttcactctcctgaccccgctctctgacctcatctcacccccctttcctcctcctggactccctccttatccagcctatatcccaagggacctttctgcacccagagtctcgagcacaccgaccctcaaaaatctcccaccccattctgcaaatgcccagcctggggcagacccacagtgctcctcctagaggatcccatctgtccccaggccccagggtccccctcccttgtctctccccacttcttccttccatcaagaaacacactcacctcttgataatgatctttcaagctgctctcttagccctgcacatggctccaactgggccccattccttctccccagcctggtggagctcttcaagcgttacttgtgtgcccatctctgcctcctcagccccctgccctctgcaccgcagtccaccaaaactcttctcatccgtcactcctgctacatcccgagagagttgggttcccatcccaggctggggccagagagctgtgccctgctctccccctcttccctgccccctgctcgtctccatggccccacgccctagtgaaggtcccctggctgctccttactcccccagtaggtccttctgccatcctgtcccacagacgacggagctctcttctagccccacatgatcatcccataccactgccccctcttacccggtaccaatgttcccaaactcgccaaggcctgtctccacgcccagggatccaactgcgtcttcagtgtgggtcaactccatccaagtaacttaatcgtgacacagtaacttcatgaaggaagtactattattatccccaatttgcagatgggggcaccaaggcacagagagagttgcccagggtaaacagctgatcagcctctgaaccaaggtctccttcctggagatccctcaagagcctcagattcaccataaacagaacaagctcacgggctctgcactgaatgtcttcttcctggccaagctggcctttggactggacagtgacaagcgtctggaccgtgggcaattttactttctgtgggaagtacttaacccagagctcaacagcagtaagtggccagtacaggccagctgctgttgtcaccatggccctccaaacctcagctgcttctagaagatggggctattgggggaatgtctgagctcagggcctggccacacgggggagactatagccctggccactccgcacaagagcctttttgcagtaagtcaaagcagcatcaatttataatgctgcaagtttggcacaaatgcactatttttcttaagccaaaataaagctccaataagctgtaaaagccctggagttgggaggattctctgcggggtcatttagggtgagttagaacctgcagctgtgaactcctcagccacacatggcaacctgggtgggtacaccccagaatgctaatgaaggcagctgctcagggtcggggagccagctttgctctggcttcaggccccagggagagggaaagccatgtggggtgagacaggacaggacctcagccaccctgggctgcgtgatctgggccaagcccgggccccactccaagctgcagcttcttccgatggggttccgaagcatgactcagaagagggaagttcagggcctggggtggggacttcgaatgatgtgtgcaggcattttcattccttgggcagagatctcaggatttgtaatagtgttgtaggaaaaatgggattaaacatgccaatatttgcttatgtacacaaccgtttccataaagcaggattgtgccccatctcaatggaagcaaccccaaagtccttcttgtttggggcaggtgagcatatgggaggctggatttgatcccaaactctgccctttgccaatcatggtctccccaagggacggttccccttgcccgttccacaggtgaggagactaaggcctgactctaaaatgcagcatcttaacttgtgtatatgcatgtgacccagctcccagtctctctgacctctggcttggtgaggtcacctctgcccgaggccctgcaccctcccccaattccctggtgcctggcaaagaacccagatcttgaaactccagagctcagctctgcacatacaagttcacgatcagaaacaagtaggtaccctctctctgggcctccgtttcctcctctgagccttggtaaaatgagggtgatgatggtagctaccccaaacagttaagctaattcatgcaaaacacccttgtggtgcctggcacaggataagtgctcaaccagcattcaatccgttcaggagataggatctatgacttctactctgaagataagtaaacagagaattggagaggtttggccacttgtccaaggtcacagagctcaggagctgtgatggcagggggagggtgtgaggggggcacgagctgaggctcaaaccaggtctccttgtccccatcagggtccagatggaaggggagtcaccgagccaaagcccccagggcagggacagggagagaagggaaggaggagagaaacaggaaggctaccaggacagagacgggaccgggagcaagctactgcctggggcagagggcccaagcccgcaggggtcacggggcacggttccccgggctgacagtgggcactctcaccttcaccctgttctctggtggctggtgaccttgacaactcaacctgcatcactcacatcctagtaaggccctgaaggcagacgttttgggggtggctcatctacatgacagcctcccacaccttgagccagagccagggtcctgccccctcccctggagttcaggagcaccctgcccacccaggggctcccattctgggctgcaggggcaggaggtgagccggagccctgagaaaccaacagcctacctacctgaggtgacctccaaccaacctcaagacctagggcacctagagggtggggggagcctccacctacagcagccagcctccatgtgcccacccgcaggcctcgcccatctctgctgacagctgggaattcctgccgtgtgacccagtcagcctttcagggctgggatcctggcccagccacccagacacggttatagctcaggctgtgagctgcctatgaggccagggcaagtgattcccatctctgggacttggcttctccaggtcagaggagggatgagctgcgagctgaaacaactcttcccacccagaggatctcgggatctggaatcccagaagccaagtgttggagagaacttcgggctgcgatttcctaacactggcctgcagcctgacaaagtcagggtccccggggagtcctgtgaacatgtacacgcgggggctcccttccacccccagcagatcagcagatgcggagccgggtgttctgcagatttagctagtgccctgggtccatgccttctgctgactctcaggggtgggggcaggggaaggaaggggagggtggggctgagggttcttcccgagacaaggtgcccagggatccctgagcctcccaaaatctttactgcttcatcccttgagtgtcctcagaccccctcccgcccgccacccagggctggaatccagcctttgctcccatcagcaactcctccacagaattctccaccagcttctccccatcctggtcctcttcacccaggagaggccacagctactggcccttccagcttcccctcccactcaaatcaggggcctgctttttgttttcttcctctcaagcctgcataaagaacactggatttagatgaacagctctgtgcacaggccctgtctgggccccatgtaactgccaccctgttgagctctaacacatttcctccaccccaaagagcccccagtcaagccccctgctcactgcacctccccggcccccctcagcagacctctagccccacagattagaagggagaagcctctttctaagcagctcttctgtgctcatcaggttggactgaaacccctgaggacagcaactgggctgtcctgctggctggcagtgcctggcacagagcagacattcgggaagggctgtgagaggaaggacaaggtggctgcaggctgcacccctgctccagctgctgccgtgatgagtctccttggctcatcatcccagcttccttcaatgtctaccacactctcagcccccagccccctgcaggacgcctggcacatggacacgcaggtgcaacacccccacctgccccggccaggcctctgtcaatgctcagacacctctttccccacagggctcctgccccatccccaagccttggctcccagaatcctggaatcacaggcacaccgaattcctggatctgcactctccccagtgcctccagcccctacccactctggcctcacttgtcctggcaggctgtcttctgtccctgtcccagcaccgtctcagcccccacagcaactcagagcctccgcactaagctattagcaggaagtcagctctccctcatgcccacaggctcccgcatgtgacctgcgacgagcaccctcccctctccaagcctcagctcctccgtctgtaagacagccccatcaggctatgtggattcagtggactcttctggctctgatgtttcctgcagatcactgcccacggttagtgtaaataaacatttattagataaataactagccccaaagaatgagtcatcattgatggtggaacggtagacatcagctgcaggccacttagaggcagaattcaagagtggtggtgaaagctggattcagactgcctgggttggaaaccctggttcacgacttcctcatctgtaagatggagatcacagtagggcagggtgaggatgaagtgcgatagtgtacagaagcagccagaagagcacctggcacttaaccagcgctcaggagaacttagctcccactggtacccccagcgccactgtccctcagcaaggctcgggagtccacatcagcgacctgcgggtggagccaagcgtagcagcagtgcctgactagtgccaccagagggcaccatgacgcagccaaagccgcccagctgaaccgagggctccctgattcatcctgagtggcagtgccagccagaagcctcccagctgggaggacgagggtggggcctggatgcccgaggagttctttctgcaggagatgcccgcaccaccttggcttgatattctgcccattcctagcacagtctgtgaccaacagcaacccaaagtgtccctaatccttccctccagagccatcagacccatttaacagatgaggaaacaggcctgagagaggccagctccaggtcatgaggtgaactctggccttcctgctcagactgacctcccagtacaccccactaaacactatgggtgtggcgcccacccccacaaccaaagctgggagccagcacctgtgcccacctgacactccttgggcagaggagagacaccagggaaaaaagcacatctaatggtggggagacctcaaggacggagggcccggggaaagtgctggatgtgagaggaagagacaaagaaacacgaggcgaaacagggtggggtgggcacggaagacaggagatgcaggagagacattcgagaaagtgaatgggtggaaagagacagacaggggaagaggcacagagacagagaatcccgagggagaaggcaaagagagaagcagaggcagaaggacggagacagaggcagagggagcgattgaggaaaagagagatggggatggggtcatggtgacagagagagacgggaggcagacccagggacaaagacctgtgggcaggggaccctggagggccaccgaagcggcttcactctggtctggagcccccatgccctcctcccaggcactcagccagagctctcgcccttgcatttctgtcacaccccctaccccagcagggcttgccagacagacaccccctcttgggggtggtggttgagccgggttccctagggcatctaaggcagacaggtagggtccctggggccgtgttgctaggagatccagcccagggccccagcctatctcctgagcctctcctagggcaaggctcaacactcacctaggggctcacctgagacctggattccccctagctttcaccccgtctggccctggacagcctctgccctgcatcctcttggcagagggaaggcacacctggtgacccagccggttgccaggcctccctggctcctgccccaggccccggggcctgctgtgttccttagaagcactagattcccgggcttgggtgcaggtggcagggagattgttcaaatctcagcctgccttttaccagctgtgtgcccctgggcaagtcactctccccctctgagtcttatctttaaacaaaaataataacagtatccattccatagggtcctctagaggaggaagagccataatgagggcacagcaactgggatgggagactggttttaagctccatctctgagccacctgggctgcagctgggagcatctccccgcagtccctgtctcccctttgcacctccttgagcaggctagagtctgattcacagcagcctcaggggaaggggctgcccagagccctcccagggaactcagataccaggagacatgaacactaggggcccaggcaaaaccacacccacatggttgttcgggcctgtgtgctgctttggggccttagatgaaagcaacttcagggcttcccaggtggcgctggtggtaaagaacctgcctgccaatgcaggagacataagagacatgagtttgatccctgggttgggaagatcccctggaggagggcatggcaacccactcaagtattcttgcctggagaataccatggacagagaagcctggcaggctacggtccatagggtcacaaagagtcggacatgactgaagcaccttagcagnnnnnnnnnnnnnnnnnnnnnnnnnnnnnnnnnnnnnnnnnnnnnnnnnncagctttctcacttgcactgctgctgctgctcctgctaagtcgcttcagtcgtgtccgactctgtgcgaccccatagaccacagcccaccaggctcccccgtccctgggattctccaggcaagaacactggcgtaggttgccatttccttctccaatgcatgaaactgaaagtgaagtcgctcagttgtgtccgactcttagcgaccccatggactgcagcctaccaggctcctccatccatgggattttctaggcaaaagtactggattgggttgctattgccttctcctcacctgcactgcaggggagttgaaaaggatgatctctgtctgtctagcttccaaggaggcctccgactgttacctccggtattcacacccctgtgtaatcactgaagagactgaatcagtgtaacagatggagcggcgtgaacgtgagagtagggctcccgaagcacaggacagggaggctacgctgctcctctgatcacaggctctggggaccccagtcgccatgtggtaaggatactcaagcagcccagtggagaggaacggaggcttcccaccaacaaacagtaccaaccagccaggtgagggggttagtcaccttagaagcagatcctttatccccaggcaaatctgcagatgaccccagcccctgaccccagccccagccaagatcttggctacatgagagaccctgagccagaaccactcagctaagccaatcccaagactcctgatccctagaagctctgtgagataataaatgctgattgttcaaagccacaaagttttaaggttactggctacacaaaataaagtaatgaatatatttccaccttctgctgcctacccccagagttctggtctgaatcattggtctttcagaaaagccctaggttggtgtcaccaatgtcaaactcaactaagttcagggaggagctcatcatatccccccccatctacttccacaattagccattgccaacggacgtcctctagaatcaaagacagatacgtggtgtgcattattgttcagtcgctaagtcatgttcaactctgcagctccataaactgcagcgtgccacggttccctgtccttcaccatctcccagagcttgttcaaactcatgtgcattgagtcagtaatgccatccaaccatctcatcctctgtcacccccttctcctcctgccctcaatctttcccagcattaaggtattttctaatgaatcagctcttcgcttcaggtggccaaaggattggagcttcagcttcagcatcagtccttccaataaatattcagggttgattttctttaggattgactggtttgatctccttgcagtccaagggactctcaagagtcttctccagcaccacagttcgaaagcatcaattctttgctgttcagccctctctgtggtccaattatcacaaccatacatgactactggaaaaatcatagctttgactagacagacctttgtggtgtgcattattgccttccttatcccagcattcagccactgacaaacttggcctcttttatctcctgcccatctctagaatcctccctctctttaccaagcctaggtgccctgccccagctcaggccacaccctctcttgccagttcagcggctcctctctagtctccctgcctccatccttgctgctcttaccacccatccatcctccacactggccgctagagggagggacttcctaaaacatagatctgatcatgatgctcacctgctcattaatcttccatggctcccctgttgcctaaggcccgaactccttggcctggctttgaaggccttttttcatctgcccctaccccttacctctccatcctcatctctagtttttctttgtctcagtgttccattgatactgagccacctgcaattcttggaacacaagagtttcatacttccacacctttgctcacacagttctctccacctggattcccctccccttctttacctggaaaattcctactaatctgtcaagccctagccgtctgattctccgtgaggagctggtctctcactgcatcttattggactacaacaaactgtttacatgtctattcacccacaaagtgacaacctccaaagcaggatgtctttttcatctctatattcctagtaccttgctcagtcccagcatacagaattccataaagttcttaaaatggaagacctttagattgaactttaaggtcaactcatttaaaaatcattttggatgggaacacctctaaaaggtattacagactctcctacctttttaaactagtttatgggacatgattgaaccttgctcgagtgtatggtttatgtcagtacaaaccccgggtttttcagaaggagccttggaggtcatccaatagaggaaggacctcaggtctggaaagatcacgtgacttgcccaaggactttgcatgacgaacgttaatgaacatctgagctgcaagacggtgatctctttgctttgatgaaggatgtcaagcccttgccttgccacggcactaaatggcccctttagtcaatgtctttaaggtttctgtatgttttagaatcatcccatttcagcactaggccagtgtacctggcccccactttacccctctagtttgttacttctggtccactggaggcaggaggatcaggtaaccaaacttgatggaatcacacggaaaggaagagttacagccctggcctgagacctgggagcactgctcctcgggggagtgtggcgggacgatgggactttgtggccctcctgcctctgctgtgccccagatatgacagttgtcgtgaggagagactgaaggcttgggctggttctggcggagggaagtgtcagcataaccaagagatcctgcaggcaattcactcccaggtagatgactccacagggaggacaaagaggcggatcctggaccctgggctccataagctcccttcccacactccctcatcagagacaaagtgcatagtgcaagaggcaaaaggaagcagggcctctggggtggggtggggagagggggnnnnnnnnnnnnnnnnnnnnnnnnnnnnnnnnnnnnnnnnnnnnnnnnnnactggataggtgggaatagctctgtttatcttatccagcgagcaaacgaatgagggtggaacaggaagcaatgaactaagagatgaggattctagtccagcttccactactaactggatgcatgtcaaggggcaactcaactagtcaatctaggtgtccgtttcagaatctgtgaagtggggatgtgtgtgaaagttttagtcgtttagtcatgtccgactctatgccactccatggactgcagcctgccagactcctccgtctatggaattctccaggcaagaatactagaggcggtagccattcccttctccagggatcttcccgacccatggatcatacccacatctcccacattgcaggcagattctttaagatctgagccactagggaagccctgaaatggggataattcctacatcatggggttatagtgggattaacaaaaataatgtaaaaaagaacttagttctaaagtgctgctcaagggaacatggccttcattcacgcattgcacaaacacttactgattacctactatatgccagctgttccaggaactggggctgtggccatgaacatgacaaagcccaggtcccatggagctgactttctggggcgggagacacataaatgaataataatgtactaatcagtatctcaataaaggacagaaacggtatggacctagtagaagcagaagatattaagaagcggtggcaagaatacacagaagaactgtacaaaaaagatcttcatgacccagataatcacgatggtgtgatcactcacctagagccagacatcctggaatgtgaagtcaagtgggccttagaaagcatcatgacgaacaaagctagtggaggtgatggaattccagttgagttatttcaaatcctgaaagatgatgctgtgaaagtgctgcactcagtatgccagaaaatttggaaaactcagcagtggccacaggactggaaaaggtcagttttcattccaatcccaaagaaaggcaatgccaaagaatgctcaaactaccgcacaattgcactcatctcacatgctagtaaagtaatgctcaaaattctccaagccaggcttcagcaatacgtgaaccgtgaacttcctgatgttcaagctggttttagaagaggcagaggaaccagagatcaaattgccaacatctgctggatcatggaaaaagcaagagagttccagaaaaacatctatttctgctttattgactatgccaaagcctttgactatgtggatcacaaaaaactgtggaaaattctgaaagagatgggaataccagaccacctgatctgcctcgtgagaaacctgtatgcaggtcaggaagcaacagttagaactggacatggaacaatagactggttccaaataggaaaaggattacgtcaaggctgtatattatcaccctgcttatttaacttctatgcagagtacatcatgagaaacgttggactggaagaaacacaagctggactcaagattgccgggagaaatatcaataacctcagatatgcagatgacaccacccttatggcagaaagtgaagaggaactaaaaagcctcttgatgaaagtgaaagaggagagtgaaaaagttggcttaaagctcaacattcagaaaacgaagatcatggcatccggtcccaccacttcatgggaaatagatggggaaacagtggaaacagtgtcagactttattttggggggctccaaagtcactgcagatggtgactgtagccatgaaattaaaagatgcttactccttggaaggaaagttatgaccaacctagatagcacattcaaaaacagagacattactttgccaacaaaggtctgtctagtcaaggctatggtttgtcctgtggtcatgtatggatgtgagagttggactgtgaagaaggctgagcaccgaagaattgatgcttttgaagtgtggtgttggagaagactcttgagagtcccttggactgcaaggagatccaaccagtccattgtgaaggagatcagccctgggatttctttggagggaatgatgctgaagctgaaactccagtactttggccacctcatgtgaagagttgactcagtggaaaagactctgatgctgggagggatagggggcaggaggagaaggggacgacagaggatgagatggctggatggaatcactgactcgatggacgtgagtctgggtgaactccgggcgttggtgatggacagggaggcctggcgtgctgcaattcatggggttgcaaagagtcagacacgactgagcgactgaactgaactgaagcagtatctcagtcagaatgggcacaactatgttgccatcaatgattcttaaagccactaagagtcattttcactcacactgtatgttcttggagaaaatgcctgtaaaccatttcaagctgcccccatctagggacccaggctgaaggaggctccatcccgaacttccacaaaagggcacatggcaagtagcaccaaagtccaaaagccccgaccctagccctgaaagtacacagatcacgactatcccatttcacttcccgccagctagtaacgtggttatgttcatcttctgcaagaggtgggggaatgcagccctgctgtgtacccagaagatgtatgtaggtgcagtgtatttggtagacagcactaatgcccattatggatagagtcttggctaagtaccacgaaaacaaatagtgtaaagagatgtgaggttggggatgagggagtctgggaaaggcctcccgaggaggtcacgttcaaacaaatatgtaaacaaaatctggagcaatcccagaggaagagcacaggaacgcaagggaggagtgagtgtcctaggacaggtggagagcaaggagcccagtgggctggggcaaggagccaggggcagtgttgtaaagagagaggcattcagggaaggaagcagaccacacggccactaagtcagccagggcttggtctttcctcggtgagatgggatgttgttacagggggctgcagatgagcagaacctttagtagataaaagacaaacagtccctggtgccagaatgcctgcggccaaagcccagctccatcccccactagcacaagaccatgggcaagttacttgatctctctgaagctcagcttcctctccataatcagataagatcagatcagatcagtcgctcagtcctgtccaactctttgtgaccccatgaatcgcagcacgccaggcctccctgtccatcaccaactcccggagttcactcagactcacgtccatcgagtcagtgatgccatccagccatctcatcctctgtcattctcttctcctcctgcccccaatccctcccagcatcagagtcttttccactgagtcaactcttcgcatgaggtggccaaagtactggagtttcagtttcagcatcattccttccaaagaaatcccagggctgatctcctttagagatcagaatggaccttagaatggactggttggatctccttgcagtccaagggactctcaagagtcttctccaacaccacagttcaaaagcataatagttgaggttaatacaaagacctacctcccagggttattgtgatggtaaaatgcttaaaacagggccagtgacaggaatggagactcagacaaagagagcagacttatggacacgggcggggtgcggcagggagggtgggacagaactgagagagtacattgaaatacatacattaccataggtaaaacgtgtcccagggacgggggagcctgatgcgctgccatctatggggtcgcacagagtgggacacgactgaagtgacttagcagcagcagcagcagtctttatcttggagaaggaagtggcaacccactccagtattcttgcctggagaatcctacggacagaggagtctggttggctgccttctatggggtcgcacagagtcggacacgactgaagtgatttagcagcatcagcataggtaaaatgactgtggctcagatcatgaactccttattgccaaattcacacttaaactgaagaaagtagggaaaaccactagaccatttgggtatgatctaaatcaaattccttactattatacagtagaagtgacaaatagattcaagggattagatctgatagagtgcctgaagaactatggacagaggtttgtgacattgcacaggaggtggtgatcaagaccatctccaagaaaaagaaatgcaaaaaggcaaaatggttgtctgagaagaccttacaaatagctgagaaaagaagagaagcgaaagcaaaggagaaaaggaaagatatacccatctcagtgcagagttccaaagaatagcaaggagaaataagaaagccttcctcagcgatcagtgcaaagaaatagaggaaaacaatagaatgggaaagactagagatctcttcaagaaaattagagataccaagggaacatttcatgcaaagatgggcacaataaaggacaggaatggtatggacctgacagaagcagaagatattaagaagaggtggcaagaatacacagaagaactacacaaaaaaagattttaatgacccagataaccatgatcatcgtgtgatcactcacttagagcgagacatgctagagtgcgaagtcaagtgggccttaggaagcatcactacaatcaaagctagtgaaggtgatggagttccagctgagctatttcaaatcctaaaagatgatgctgtgaaggtgttgcactcaacatgccaacatatttgaaaactcaccagtggccatcagttcagttcagttcagtcgctcagtcatgtctgactctttgcaaccccatgaatcacagcacgccaggcctccctgtccatcaccaactcccggagttcacccagactcacgtcctatagagtcagtgattccatccagccatctcatcctctgtcatcaaccttctcctcctgccccctatccctcccagcatcagagtctttccactgagtcaactcttcacatgaggtggccaaagtactggagtttcagcttcagcatcattccctccaaagaaatcccagggctgatctccttcagaatggactggttggatctccttgcagtccaagggactctcaagagtcttctccaacaccacacttcaaaagcatcaattcttcggtgctcagccttcttcacagtccaactctcacatccatacatgaccacaggacaaaccatagccttgactagacagacctttgttggcaaagtaatgtctctgcttttgaatatgccatctaggttggtcataactttccttccaaggagtaagcatcttttaatttcatggctacagtcaccatctgcagtgactttggagccccccaaaataaagtctgacactgtttccactgtttccccatctatttcccatgaagtggtgggaccggatgccatgatcttcgttttctgaatgttgagctttaagccaactttttcactctcctctttcactttcatcaagaggctttttagttcctcttcactttctgccataagggtggtgtcatctgcatatctgaggttattgatatttctcccggcaatcttgattccagcttgtgcttcttccagtccaacgtttctcatgatgtactctgcatagaagttaaataagcagggtgataatatacagccttgacgtaatccttttcctatttggaaccagtctattgttccatgtccagttctaactgttgctttctgacctgcatacagatttctcaagaggcagatcaggtggtctggtattcccatctctttcagaattttccacagttttttgtgatccacacagtcaaaggctttggcatagtcaataaagcagaaatagatgtttttctggaactctcttgctttttccatgatccagcagatgttggcaatttgatctctggttcctctgcctcttctaaaaccagcttgaacatcaggaagttcacggttcacgtattgnnnnnnnnnnnnnnnnnnnnnnnnnnnnnnnnnnnnnnnnnnnnnnnnnnnnnnnnnnnnnnnnnnnnnnnnnnnnnnnnnnnnnnnnnnnnnnnnnnnnnnnnnnnnnnnnnnnnnnnnnnnnnnnnnnnnnnnnnnnnnnnnnnnnnnnnnnnnnnnnnnnnnnnnnnnnnnnnnnnnnnnnnnnnnnnnnnnnnnnnnnnnnnnnnnnnnnnnnnnnnnnnnnnnnnnnnnnnnncttgatgaaagtgaaagtggagaatgaaaaagttggcttaaaactcaacattcagaacactaagatcatggcatacagtcccatcacttcatggcaaatagatgggtaaacaatggaaacaatgagagactattttcttgggctccaaaatcactgcagatgatgaccgcaaccatgaaattaaaagatgcttgctccttggaagaaaagctatgaccaacctagacagcatattaagaagcagagacattactttgctgacataggtccatctagtcaaagctatggtttttccagtagtcatgtatggatgtgagaggtggactataaagaaagctgagtgctagagaattgatgtttttgaactgtggtgttgaagaagattcttgagagtcccttggaccacaaggaaatccaaccagtcaatcctaaaggaaatcaatcctgaatatacagtggaaggacggatgctgaagctgaagctccaatactttgggcaccttatgtgaagaaccaacacattggaaaagaccctgatgctgggaaagattacaggcaggaggagaaggggatgacagaggatgagatggttggatggcatcactgactcgatgaatgtgagtttgagcaaactctgggagatagtgaaggacagggaagcctggtgtgctgcagtttatggggtcacaaagagtctgacacaactgaatgactgaactgatatctaaaatggaaagctgctgtataacacaaggagctctacctggtgctctgtgaccaggaaaatgggagggaggttcaagagggagggaacacatgtatgtgctgtgctgtgcgtagttgctcaatcatgtctgattttttgttaccccagggactgtatgtagcccagcaggcttctctgtccattaaattttccaagcaagaatactggagtgggctgccacttcctcctccaggggatcttcccaacccagggatccaactcccatctccaactctgcatttgcaggtggattctttagcacagcaccacttggaaaggtccaccaccacgatccaacaccaacagagattcatctcccgtctcttgaggcccagagcctgccagacatgagtctttccccacctctcctcagcctccacatctgctaggagggagcaaccctccccagctgtctaggcaatggagcctggagctccctggggagcacagtctctcctcctgccctgcgcagcaggtgggtgctcccacactgcaagacagatttctaattgcctgcactttctgccctctatcccagggcggggggctggggaagctctgggtccctcccctacagtcaccccccagcttcgttctggcagctaagctctctctcgggcaggagctggcacctcacccaggaggggagaacagctgcggagatggtgggagaattcctcccgctgctggatttgtaaaacaattgattaaagacaatgcaattaattattccttgatgaaatagtggaaattaccccaagaaaatgaagatttcagcagcagaacattaaatccctctaattatgtcatttctaaaaaaggggggagggggataaaaagggttgaaatggtgggccggagggaggaaaaaagtgtaaaaatagatggggtgactctggggctcctgcagggtgagcaggggcaatagaaggggtcaccgccctggcccggaccacattgtttgaggggaaagtctgaggtgacagagctctcggcgggggacagcaagcagccgtccagacactgggatacgtgccttgggtgcattagcaaattatcctcactctgaatcccggtgccttattcccgttgtacataggagagaatgaggctcggaagaggcacgtgacttgtccaaagatgagctactaattagtagagacaggccgtgaacttaggtttaactccagaaccggtgctttttcaaccccacctgctgcagtctatggcagtagccactgcagatgcccttggcagaagtggctgtgaccactagctccctgagggtctcagtggctcactgaagggctgggtgtggcagggagggtagctgccaggtgttgccatctctgccaataggaattgggcttgagctcccctgggaagctctagcccttcatcctctctgacacccctgggcatacttttggaagccagggaggggtggcaagtgggacctgccaggggcctagcctggcctggttctctctccctgggagacccagatgctccactagggtgctgatggcctaaattccaatctggccttgctggggttgccatgtggcctcgggcaagttcccttgccttcctggacctcagttttcctatctatattaggggatataagatcagtgcacgtatgggtccatttgagggtaccagatccagctcttcctcagctcagtttcaagaagccagaatcagctctagagtgggcaacaggaggaaacagacaaggggaagtttgagagccagcaaagaggaactctgggttctagcttctggggctaggctaacaggaatcaggaggaatccaggaggtctgtaagggggcagtgggtggaaggctatcccaggagggaagagtgatctgagtgggaggacagaagaagaggggcctggattgaagttagaccactaccccccattcctgcctcaggacaccaatcaaggggacccattgcctggaatggctgggcctggcagggcctaaagcagaggataattgattctcagcatcgctgaggttctttttagagcttgctttgtttccctcctcttggaccatatctgagcatatcccataatttttctggacactctcaggcactatcagtctcatttttatgagttaaaatttccaatctaatctagcatcaaaacttcaatttctcattcaatctaaagatttgctctttccctctctagctcaggcccaacccagcctaagaagcattcaaaagggatggaaggcctggtcctccaggatattggggctaccagatcctctctgtgcagtatttttggtgggactttggagtccccctcactgggatccttcagctagtaattccctgacatgtgcaatgatgctcctgcttctggggctcatcccactcagtctccaagaggtcacctggcctcaacaggcaggcccttccttcagcatgccttggtgtagccgctccgacccacagaagagcctgggcttgccagactatccccaccatcctagacagctccaagtcaccaccctcttctagactcttttcaagccagagtcaggccttggccactgtgccaacccaatgcttggggatacatgtcagcttttccaaatgtttcccctgaagctcccactgctcacacaatcaaggtgagggtagcagggcacagtcctcactgcccatctccccctgcctcacctcctcaccctcacttccctctgtgtagcctggaagtaagtagtgagggtcacagaaccaacttgggggcaccaaccttgcaaggcctgaagagatctacatccccatttaaaatgtgggagttctgggcactagttactctccaagcactccaagtacgccgtgtcccatttggacagcctattatgaaagcaagcctctgcttctccaactggttctgcctccttctttggccatacccctgtccttgtcacctaccccaagtcccaaccctctctctgtggcaggaccctacagcctcatgtccactactgagaagcacattcactccagccatcctgcagtgcctggatggagattgtggccccaagcaggctgcctgcaaagccaggcctcaaacctgggtgccaactcacaggccaatgcttcttccaccagctcaacccttggccatcctctctccaggagggatgagctgactgatggagcggctggggcagggaagagtcctttcccctctcgacaccagcagtggttcctacaaaagcaaagttgggagtttgaatcctggtgctcctactccccagctggctgattagaggcaagttgcctcatatttctgcaactcagttttcccccctgtaaaatggttatgataatactgaacccagagggttgccaggaagggtaagggagatgaggtcctagtcaggcattggcacaaagcaggttagtccccttaggacccctcccttgcagtcaggataccagggttccattccaaacccagagactaattttctggcagaaatgggtcttgaacttcccatttgtgtccaggaaagaaaggccacagagtggtgaggcagaggtgggagtctgaggggttaaggaggggaccctggaagagagactttagcattaggggtggtaggggcacagctcagatgggaagggctgttcctccccacccatctgctcccagacccctcccaccagagatggcattctagcccctcccacagctccagcacagatggcaggaaggaaatgccaaggcatggaggtagggaggggccaccaagcccccggaggctccagcccttgccaagtttcccagaggaggaggatgcaaaagccccctcccttgctatggcactgccctcccagagccacagcccactgatgccctggtgccttgtatcccgttgtcatggtaaccaggactagctgacgtgccgacaggcagaccaggagccgctgccacatgaatcacttgaacttgatgtgacagacccaggcgggtggcctgcacagaggcagagggatgtggtgccctgtgggcagggacggctcaggctgaatctctccaactgtgacaggtttaggggctccagaagctcatnnnnnnnnnnnnnnnnnnnnnnnnnnnnnnnnnnnnnnnnnnnnnnnnnntttcctgccctcactgagcttatgttctagtgggagaaacagacccaaaacaagtacccaaaccaacaaaatgccccaggaggtgatgaggctctgaagaacacagacaaggaactgggctgcagagcaactgggccaagggcttattttaggaaggatgatcagaatggattttctgagaagatgacatctcagctgagacctaagtgatgagcaagggctgaactctcaaatgaaaaagagagagttccaggccagggacagcaaaagaagaatctgagatgtggttgaagcacaggaggaggaccactgtgaagacagtagggcagacaggttaagtgtgaacggtgattttatcccaaatgcagtgagtggtggaaagtcaaggaactttgaataaagaagcaccatgatttgatttccaggtacatgctacaaaagctctagctgccgagtggagaacaggccttctgcagcaagcccaggaagaagcccgctgcagaagtccagagcacagaggagggtgctgtgaacccacaggcaataacagagaaggagagaaatagccatcttcaagaaaattctcggagacagaaactccaggacttgtttctggtccatataagagaggtaagggaaaggagagaaagaaagacaacatgtgggcctctggtttgagtttatgggttgtttgctgttgttcagtggctaagctgtatccgattctttgtgaccccatgggcagcacaccaggcctcccttgtccttcactatcttctggagtttgctccaactcatgtccattgagtcgatgatgccatctaaccatctcatcctctgtcaccgccttcttctcctgccttcaatctttcccagcatcagggtcttttccaatgagttggctcttcgcatcaggtgtccaaagtgggtggttagtggtatcaatttctaaaattaggagaactgattagtttgtagatcatctgtaaagacagggcttatgttcacgagacaagtccaaggggctaaagtcttctctgaagggtggaaaccacactcctaacagagaaaccttcaggatgggccacttcctctccactgtccccaggcagtcccccagcctttccaaaagaagtgtttggagaggctacatggccatggccctcggtgagaactctgttttgaaagtgacagaaacctaactctgaatttcataggcacaaaggatgatttagtggcttgcagaatgcaaggaattaacccatgggaatggaccagagagcagctgggcctgttctcctctctgcctctccccacatcccagcttttccattccaaccacaaaccaacttcttccccaaggcaggaagcactgaatcctcaggatttttaaaaaagaggaatcaacttttttcaaaattgtttttctcttcaatagaccacctttggtctaaaaatattaagaaatgtgacaatgaagtttgtgaatgaaaccacgacacaaatggagtagtttgtttactactcaaaatcacattagtaaaaaacttcactcttctaaaaatgattcacatacaaaagtagtaaaactagtctaaaacaggaaaaatataatgtgaaaaaatttataaaagcatcctctcagtttttatattctgtaacttccaatgactctcatttccagttgaaaaacttaagagaattttaattggctagggttgaattatatgctactgttgggcccatcagctttgccacgggtggggtttctataagaatatgacagctcacactatgtccacagctcacactaaggaagggctatgatgcccaagagacagagatgattagacaatgctcttttacatgatatgggtcagcagaattcccaaccagagagatgaaagggaaccatgagaacaaggaaaaatttgcaaattttggagaactgagcagtttttacttggagttccaggaaggacagccagagaaatgcccacggccctcaaagctatctactgagagcagaagataaaaatcattgtcctgatggagtttgtctgtgtgtgtgagaaaccagaggggcagtgtccagactcgaactggttgagtagggttccaatgatgcccaactgtaatatctggtaaacccttatctccccccagagactggcgttgccagtcaaagagcctgcagatggaacctgaattggcaaagcagacagaagtggaaggtagtcagtcgattgccttccaatgagtgggaggctctcgagcccctcactagccatgcagtcttggataagttagatttcacatctctgagcctcggtgtgctctgattttaaatagtgaatgtgcaaaaattaaagaaaatggtgaaagtgtaaaattaaataaggtataaaggagagtgcctctctcataaggtcaagtgaagagatgatgatataatgcaaggaaaatacctgctacagaggctggcacatagtatgtgcccaataatatcatctaatgctttcatcactgctacagaggaggtgtgtgaagtgggtaggtctgagagctttccgttaacgtttaaaaaaatatttatttatcgctgtgggtgagctttctccagttgaaacgagtgtggtctactctctggttgtgcagacttctctcattgcagagcaaggactctagagtgcgctggcttcagcagctgtggcccacaggcttagttgccttgaggtgtatggaatcttccctgaccaggaattgaacccctgtcccctgcactggcaggcagattaccagggaagtccttccattaacttttgagtgcctcctagaggacagtttcaatatgggaggctttcattcttggcattgactccaccccaggcaactgtaatagcaactttattctctgatccacctgctaagtgtcaggcactgggctaggtactttacctctattatctcatttttgagcattatcagcaatgactcgagacagtgtatcagttagcttctgctgcataataaaccacccccacactcatagcttgtaacagcaaccccttacaaagctcatgattttaaggttgggacatccagcgaggctcttctggtcttggctgggcctgctcatacatctgcagctgctagttaagtggctccacttctgggagttgcctggctgtcatctgggtgatggggatgactgagccatgtgtcttttttcatccagcagagtagcccgagctttttcacagagaagctgggcagggttccaagagaacatatgaaagtgtgcaagacctcttaaggcttgggttccaaactggcactggcgcttccaccaccttcaggtggccagagcaggtcacagggacgtcccagattcaagctggtggggagaagcttcacggtgagattgcatcaggtgggctcagaaagaggcggagaaatgtggctgatcttgcagtatcaggctttccttgtgactcagctggtaaagaatccgcctgcagtgcgggagatctgggttcgatccctgggttgggaagatcttctggagacgcgaaaggccactccagtattctggcctgaagaattccaaggactgtttagtccatggggtcacaaagagccggacacgactgagcaactttcactttccttcctttgcagtataccactggtatactacaagataggtactggtattactgccatttcacacgtgagaaaattgagactcaaaggggtaaaaatgtcttgccccagtgatgctgctagtaagcatggcagaagcaggatttgaacttggggggtctccacactcaactgcattgggacatgcaaactccattctctcaacggaagcacccttgtctggcacagtccacaagggcccaatctaacaggcaccagaggacttgactgagatgagggcggggcgggagcaaataaagagatgaactggaagaaggacaggagcaagggattcagacagagcctgtggccacgacaaggatgccagcttggcgacgtggacatcagcctgcctcatgaagccacagaactggacaggccaggccagggctgaccttcttccaggcagaaaccctgcctgcacctcacgctgacagggccctgcggtgagcctacggtaaaggagctgcctctgctgcctgctgccgagtcctcagaccatgggtggtgacagtgctggccagaagatcaaagaagtgtcacaggtgaaagcagagatctgttctcctgtgagcattcagagcactccaagctggtctctgtgtctgtgccgagggtgagcagagagacactgggctggccgtgaggcgccccacctcctcacctcccctgtgaccggcccctcccccacagagaaacccacgccaggagcacagctgtgcccagccaagctgccgggtgccaagccgggcctggcgggctccctctcatctgtctctctttagcaggaacaaatgggaatgagggaatcaattaacaaggctccttagccaaatgactgctgctccctccttccccagcctgttaacccttcgctgccagggccgggaagggctgccccggctggccgaccgcactcagccctggggcccccatctggatgccgcgctcctgccttgtctgtgccaagtgctggcagcagctgccaagctgaggaaccagagccagaaacacagacacctccattcaacctcagtggaatctggggtcaggctcaaaggatcttcagggcctccggcctggccctttcttttctctccagagacccagggcctcctcctgcatcaaaaaccactgagaagaaggttcaggccgggagggtggctcacggccaaacctgacctggggcccctactgggtctaggaaagggtaggggcccaggggacagggcaggacaccttgggccacactcaggaagccctgacacctcgaatgtcaggagcaaatggtcagtctaagaatcctctcagcggaatttggacaggcaactgtgggggcctggttgtcaggaggcctgagttcaagttccggcttaacagctgacatggggtctgatgatattttgaatgattaatcaataggccactctttctcccacccactctcaccaaatgtctttatttgtcctccaagggtcttttgtctttcaccattcccactgtcccttccccacccaaccccaacccgccagccctgcctcagtagtcaggctttggtttgagctgctgctgctttaccggattcaggactgccatgcaaagcctgatccaccatatgctgcggcactggggtcacagagaaacaggggtgtgctcttggccttttttatattcaaaagatactcaggttctaagttcagaccaaaaaactcagatgcagctcacatggagagaaccacctgcacccaccccctggattggataaaagactccaaaggctggaagaaggtggcaaaggggaccagagaggacatgtcagcaggaaggactgcctacccagccctgacactggagagtgagctctgggcccagcaaggcctgagacacattcatccatccattcattcattcatttgacaaatggacagtgactactttctgtatgccagacactgttctgggcacagtggatgagcaacaaggaccctggccttgggcagggtgaggctgaggacatgagagtcactcagtgatggccctcagccatttatccagcaattgtccagcaggagggaggctgttggtgccctgagttttgcctcagcagcaccctaggtcacccaatggacacggcaccatcctgcccggcttctatccccaggacacttgtgagccacctgggtgaagatgggtcctagacaagcaggggatgataagaggacgggaggagaggcctgagaggagactgccagcaagccaaggtcatgctgaagccacaggactgcccctccctgcccctaacacattggccagtctcctttctaaaactcaccttgggcccaagttcaaaactccagccacaactggcctggtgtgaatcagaagcccatcactaagccaatcagcactgcccaggagtagggatctataaacaatggcagctcccattcccagagcagggtgagcatggggggaaatggttccctgaagacaaaaccaccaaaggccacaatactgaccttggtcgggcaggtggaaataggttgagcctcacttctctgacctgtaaaatgaagctgatgagagtgccagcctcactgggctatctttagggttaaaggagcccattcagatgagagcgctttgcacacaacaggtacagaaggaatgagagtcaattctctgtcctcagtcactccctctctaaaatgggtgggtgccctggctcatttccccagccctgatgtcccaggatcccacagccctgagcctccatgacaggcatgagcgatcacagactctcctctcagaggtcaggatccccttctgttcctcaggactgggaaaatcctctggctgctcttcatcttccccacttcagtctccccaggccctatgactgtcccccccaccccccaaccctctgagtttctgcctggagaagtggatgtgccaatgtgcagagcttgaaccagagttcagatcccagttctgctgctgcctcaaggctggatgatcttggtcaggcttcttcacccctcagtgcctctgcttcctcatctgtaacagagaacttaactacaatagacactgccccgtgggggcgctgtttctgtgtcgggccctatgcacacgtgctaagtcacttcagtcatgtccaattctttgctaccctatggactgtagcccgccaggcttctctgtccatgggattctccaggcaagaatactggagtgggttgccatgccctccttcaggggatcttccccacccagggatcgaaccagcgtctcttatgtctcttgcattggcaggcaggttctttaccgctagcatcacctgggaagcccttaaggccctataagtatcagctattcaggttctcatctctgttggctcctggaccaccccattgggaagtagcttggatggtaggagtgagccaagcactgggcacagaggggtgccccagactgactgctgccaccctggcctccttgagttccccacctggtggaggcagacgcatcagcaggcaatctcagtgcagagagaccagggccactctctagggaagcctggggagaagtgtgcacaagattggcccaagccaaggagggaaaccaaggcctgctgggactggtgacaaccggaagctagtacaagtgggctgggtgaaggggggttcaggataggggtccaagcagaggggtcaactgtatagggaactcagccatgagagcgggccaggagacagcatggaggacccagggtgctggcagctgcactccagattgtggagcctcagggcctgcctcgcacaggactctgtgtctgggtgtgactttgtgtaatcgactggggctgtgtgtgtatgtgtgtggctgtgtggtggctggtgtgcttgtggatttgtttctgtgagggactgtgtgtgacagtgtgaaatagtgtgtttcgaagagggcggagcttggcatgcctgtctgagatggtttagggggcgatcactgcggctgaccactgtgtgtgactgtgtgtccatgggtgtccctaaggtgtagataagtagccgctggctgtgagcaggactatatgcatgtatggtatttataggtatatacatggaaggtgaatgtgtgcgtatctctgtgtaggtgtgtgtgtgtgtgtagacatgtgtactgctgtctgtggagtccagggcaatgagagctgctcctccttccagcctggctgcacacgcacgggcgcgcgcgcgcgcacacacacatacacaccacacacacacacacactcacggggctgggaggggtggctgcccgttgctgccacagccagtcagaacttgctaatttgcatgttaatgaagctcgggagctctccagctcgagactgacaggagcccccggcgcccccccacatccttccctgacgggcctgggagggggggagtggggagggctgagaaccggcggagggaagaagaggcggaggaggctctcactgtagcttccctttctctctccctttctccctctcccacccctgtgccggccccaggccccaccacgtgtctgcccgcccctcagccccccttcactctccctcctggcccagcacagggagagggggctggggcaaagcccccggggcaatggcagaggaggctgccaaggttcccctgaggtgaggctgggttgcctacccctgcctctcagggagcacccagcagaccagccataggcacccacccaggagcagacaccccgggatgggacatctgagagtggaggggtgccaacacaggcaacaggccgccctcctgtctcccccgcccccgcaggcttcagtgcggccaaggtgggtcaccacgagctcttccgcctgcacccccgagaaagggtcagtccatgcgaggtcagagctcccgcccagggcggggtggggggtggcagggatggcacgaggactctggagatacaacgtggggggagggactggggtacacatggaaggtgcctccctccccccagggctgtgctcgcagggaaggaaggctgggtggggtggtgagtaggagatgggagccctcacagctttgatcaacaggtcagtcctggttgcgcggctgtctcctgctcagtctgttccttaccgcattcttgtctgatcccggtccttcaccgtcccatccccctaccactcctgccccatcccctccttcctttcttaatcagccacatcccacaggaggctgagctctctggggagcccttggcagccgcctcctagaaacactgtctggttttgtctcagaggtgtgtcccctgccttgacagagagctggtctgggctgggggtcctggctcctgccctctcagcctggctcccaatgagcattttctccttcctctgccttcccttccccaacattgctctgggcactgggtctggctccctgcccctctgtctctccctgagcccaagtctctatctctccctccttttccccagatgctcaaatattcatcttctctccccacccccagtctctctttctgccttgccctgtaggtctctaaacacccacccctgcccctactcccatctccccctgcccccccacccccggtggcaggcctggcccccaggtgtgtctttgccagagaggggaggcagagaggtgaggacccctcaggccctgaatctctgcaggtgagaggggagctgggcagttgctggtgttaattgcagggaggatgtctggcagaaataaggtggtttttctgcttcagtgacgactgttacaatcaaattgtccacagacaattagcggagtgggagaaataagaattagatttctaattattttcccagtaaaagccgccctggaccccgtgggtgagggggaagggcttctcagtggagccaacaggcacttttgtaggccctgctccctggggtgggggagcctcatgggagctccccaggcaggcaggaaggggctggaaagggcagagaatccggacacttggatctcagaaccagccgccatgggacttgctggcacttctcattttttgagccttagttttctctttccagaatgggggaacaaccattcctaagtagcagaattgttgtgaggagtcaaagaggtgaagcagcccccagtacaactcacgactcacacacgcctctgtggacttgcaagctcgcacactcacacactggggaagtttctccttccaccccctttgctgctctgggtctgtgtgtgtgacacatgccggggactcagggaaagggggcctgaacccaaggagagcctcactcaacagcgtgtgcctccctgagctgtgagcctccatctccacatctctcacatgaggttacgcatggtgccttccacctgggctgaaatgaaggttaagtgacacccacgatgggggcgagcctcagacctggccccacggcaagtgctcagtaaaatgaaagtcctatccaagggggccagcccgggcctgcggggctggacacagggctctgtgcagagtgttctgggtccaccagacccaaccttcctctggggcctaatcactcagagaagtgaacagaaaaccaagccaagaaggacccaccctacggatcagatagttctgggttgtgtctgggctgtgtgctttctagctagtcaggcagtgtctacatcccctctctgaacctcagttttctcttctgtaaagtgggacaacagcagtggcttcctctaggagttgctccaaggctgtgacattaatttgctcctggtaggtgctttaggagcgggaggggctagaggcacaatcgccctgactggaacaccatcccccatcccccacccttgtcctgcacagagtcaaggactaagggtgggagcctccgggttgccctaggcctttaggacctactccccatggagcagagggaacacccagctcactaatgtcctcagggcccagactagtgacagtcaacacacctgcacacagaagcgcccatgcaggtgccacacctgaccgcactcttgctgtcacgtttgtgcatgcatctcaaacgctcacacgcacacatacacccttcctgatgcggccagaatgtccccatatgaaccaaggggaagctcctggccacacccacgggggatgagccgggagaggcagctgcaagccagctgtggggtctggagtgggcgaggggagctgcttggatacccagctgggagtcgggcaggagggcttctcagctgtctcttggctccaggcccccttcctacctctgggggccagctggcccagctgggcagggtggaggtcacctgcctggaggtgcctgtttctctctgcccctccccgcggcctttcattcagcaacaatacctgggaccccgcccaccttctgtgccatctcccccctcccttcccactctctgtctctctgtctctctgactccttctgtctctccctgggtccctggatcttgtctctctgggcctgggtctccccgccccagtgctgggctatgtaaatgtggtatttcccgtgtctcatcagcaggactgcctgcttggctcacatttaatttgatccgtggcggcgcctctgcggagccactcatcaaagcgggaagacaattaggtgaatgtcagggtggcctaggccccacggggtgaccagggcctggggctggggccatgaagtgtgaggggcaggggcctggctgccaccctcatctccctcggggcctgtccagacttggcccaacgtctgcgggctggccagccgcctggatggcccctgtgaagaccaagctcctctctgcccaggacctgcagcactgaggaactgaggggcatggctggagctcctggacttggcagaaccccctcctcacccccaaaaggaggcagctgtgtggctacagtcaggtggactcctgggctgggccctcgacaggcctggtagagggtctgagctctgagctagctcagggtcccctgagaagggaatgcattctttccaccagccccgcccggcgcgcccttgctggcgccaagccagcggtcctctcctgagcctcagcttggccttttctcctccctcctctgtgttgcttcctctccttctgtctttctttctctggctgttattgtgtctcttccccctctctacttctttcctcagtctcattcctttattcccaacctctccttttctgtatcttataccacccccacccacccccatcatgtccttggcctcctgggaccctttagcctcagctgctcatctgtaattccccatccctgtccctggctgatccttccccacctgaggctgacctgctaggtaaatctgaactccctgccccagcctgacttcctcctcactgcccccgaccctcagggatccctgaatctctgacacctccctccctactggcttcttcatgttagctgtcaacacattcaagtctctcctgttttaaaaacgataataataataaaatgccttttaaagagatactctccttgatggccccactgcttcctccacagcccctttctctcctctccctctagggaagcttctgggagagcaatctactcttgcttctgacccccttccaagctggcttcgggaccacccctcaggccctagaaacagtcctcaggaaggtcaccagcaaccttctcatcactcagcccccttgatcacacctcacttggatgcccagacagcatctgaacaactgacttctctcttcttgactctcccttattcacacaatgcctctgggttttgcctccacccctttggcctgccccttcctggaccccacctctgccctggcctcacagttgccctccagagccatcccagctcctcttctccattcaccctctgtacagctccttaagtaatttaacccatgccctgctcccccgacccaggcttcagtcacacttgtgtctacacctttggccttctgctctagcccagctctttcttctgcgcttaggacgcaactattcactgcctcctggcccctccctgcgtgttccatggccctcccaaacccagagcagcccaaaccctgacctttcaagcctgtttctccttttgggttccccagttggatgactggcactttcatctcccagtttcccaaatcagaaacctggaggtgaaaccagagctcctttcccccaccactttcacacagtgggtgataacagacgacagagtctgcctccaaaatatttctcttctataaagccttgaaagtccaccctcactttccccatcctccctaggcagacctgctcaagccaagatgttctcattgttcccttggaggcatcttaatgcttttccacctgcaagtgtttactactttttatccccacatggaatgcccactttctcttctttgcctaacccatgtcaaatccatcttgcccctcttcttaaaagcctagctccagccccctgcaaggaagttctcttccctccatcccagctggcagaaccttctcccaccctaagctcatgaacccttcttgtctggtgcctggacacacaggatcatctccgctctttctcctatatacatggtctcctacatttcccaggctccttggtaagtgggccatgtgaatgcttctggccaatgagctagagataaaggtgaaatggtcacttcccagccaaagcatacaagagctagtgtgcaatcttctagctgccacagcaaccaacctctttggagatggtagagcctcaagatcaaagcagcatggaaagctgagtcccctcatgaaggacaagagccctcagatgcctggtcctgcagcagactttgtttaagcaagaaataaacttttgttgtgttcacccactgtgattgaggggttgttggttaccgcagcatagcctttcctatcctgactaatacaggccttttggagtgttattttcccatctcttgtctgaggataacattctgctctcactgtggtagtgagaattaaagtattaaaacatccacattcagcttctgagtgcctgctgcatgtcagactcagtataagtacctgactatgagatctcctagctggaaaagtattatgaactgaatgcttgtgtcctgaccgcccccctcctcaagttcatatgttgagacccactactatggtgtttgaaggtggtgggcctttgggagataattaggcttatatgaggtcataagcgtggaaccctccgtgatggtattagtgtccttgtgagaaaaggaaaccttaaggaagccattgcaagccaggaagcaccaaaaatcaaatttgtcagcaccttgatcttggacttcccagcctccggatgtgggagaaataaatgtttgttgtttgagacacccagtctatggtactttgttacagcagcccaagcagactaagacagcagggctccatttatcagagagaagagaagatagctacattcagctgctcaggttgggtactgaacaatcccagcggggaggggcactggcagagattataatgtggaagtcactccctggagctgtgaactgtagaaaccctgttgtcctcctagttacagtgttgctttaaatcactgataaacattgacactaattttgtagttataaagaggaagagttggggtggggagggggcttgaaaaaggcacgggagaaacaggaacaatgcttgtaatttcatagtattaataaaaaataatgatgtcaggaaaatttcacatcgtgctgctatgtgccaggtactactccaaggctttcatttacatttattcatccatttctcacagcagccctatgagataaacatcatcatcccccatcttacagatgaggaaattgagtcagagataaataacccaacatcacgtggcttataaatagcaaagctaggatttgaactggggcttccaaggtaaagaacacgcctgccagtgcaggagacataagagacgtggattcagtccctgggtcgggaagatcccctggaggagggcatggcaacccactccagtattcttgcctggagaatcccatggatagaggagcttggtgggctgcaatccactgggtcacagagttggacacaactgctaagtgacttagcacacatccacaggatttgaatccgggcgttttggtttcagaattgctctcaatccctctcctgttcgggctcctaaaatgaggataatgtgcaattcctcccccacctagggcctggcctggatttgagcttccagggttaggatgagggcaaatgctaaagcaactgattttatgagggtgtctgagaggacatgtgcacagctctctggggcccagggcacaaggcacagagctgagcaggaactcagcccccttcaccacttccattcctgtaacccccacctcctgctaccttggcctccgtacagaccccagaagcaccgtggcatccaaagggcagggcatttgaaatattcaggggccacccctttggcctggcattgatgggagggacagaagggaagattctccacacatgttgaagggtggcagatgggcataaacaggagtttgggcaggacaaattccaagcctgaatcctttgagcataataataaatgcaaatgtgacctctcacattctcaaaggtccttcagcttgtgacatatcatgctacagacaggaactcattcagttcttatatcaacccatttcacagatgaagaaaccaagcatcagagaacttgaatgcccagagtcattcagccattaggtagcagagtctggcagatccagggttcacacaatgtccacatctccagctacccccagaagtgccagtcctcttgagagaattccccatgtccccaagggtacctcctactgggaaccagggtatccaggtctcctgcaacctggcaggggtctgtctactagggtgagcctttgcttcacccgcccacccgtgtgctagggacagaagggggactttatgtgcaatctgcctgactctccagaaagcacttaggtttacgatgtgcatgaaattgatcgccagttggcgcggcccccgcgcgctcagtgccagcccagtgctggcaggaggctgccccccaccccccactttcaaggagcatcaaagccgcctgccaaggcccctcgtgagggtccttctccactaacaagtgctgagtggcggggggagctgtgcccaaagacctttccacagcacacatacccccgccccacagtagttaaatagctccatgttttatgccaattcctgcctcttctgcttcctctctaacaagctgatgctttcaaaggccccactaattggtgtttgcacctcacacaccacgacactttgatagtcacttaggacatgggtccgtccatcacacccttggtacagagggtggttcacctccctgcagcaaggtgcccagcctgggtgctcctgctcctgtgcgcacacaggagagggcccgcgtgccttatgctgtatgtggaggacacgtctgcacatatatgtgcacgtgggtataaaaactccttcagaatatctcttgtgtatattcctgcttgcgtgtcagtgcgcgtgcatgggtgaacactaccatctgtgcgtgtgggagtatgcagtgtgtgcctgtacatttccctgggcgtgtttgtgtacccacgtgatagagcttgtatgtgttgatgcatgcactcgtatgctttgcatgtttgtgtgtggatatctgcttgcaggcaggccggtacttgggaatttttgcaagttgactaacaaggtacatgttcatgtatccatgggtgtatgggtttgcatgcctaagtgcaggggagggtagacacgtccatctgtgtgcccatgcacaggcagggtgcagggatgagggaatctctggttgggcaatctacatagcacgcatgtacttgggcatatgctgtgtgaagaaaaggtgtaatacaatagtcaagggcccacaggctttgggttcgagacccggctctgccactttctagctgtgtgactttgtgatgaccactgaacctctctagtcacatctgcttatctgtaaaatggggatgataaaagcatctgtctcatattgctgttctgagaatcaaatgagataatacacgtagagggctagtccgatcttctctcattgctgggcacacacaaccccatctggcctcaacacggagttgactgcccaggagagaccctgggcacttggggagagaaatggccagccccagaccacacagtaacagctacaacctctgagatcttcatcacatccaaagtgatttcacacttttattacctacctttgaataggtgggaaactgaggtgctgaagtaggtgggagtcggtggcagagcaggaacttgctgtcagaagacagcctacagctgagctgtgggaagctgggatgtccctcatttccaagggagagggggcggcttcagaaggatggagtaatgcacacacccgtgcgccctatgcaccaacacacgactcagaacaaaggggtttccttacctgtcccagcctggggtgcctgcctcgggggagcatccctgctggggactcaggctgagtactgccacccccagggtgcccagccatgtcccttctgtaaacccagctgtagttgtgtctgatctgtgttatcttctcaccaagacactgaggcacagagaggggaagaagcttgttcaaggacatgggacagaaaagagcagaagcccccagcaggcaggccaggattctcatctcttgctctcctccttcaccatgcagccttcactgcaccaaccaggctggcgaatcaggggtcggggcaaagtcctccccacggcaggtcatagggccttcaaacccacccaaaggtcatattttgcagggtgatttttttatgctactttttaataaaattttaaaaacatgaaaacttaaaatcacaaccagtagcagcagcagccctgcttccttgccagtcaacattgcctctgtcattaacactgccttccccctgagccatcaccctctccagcatcagtctgactgtgcccccacctccaactcccaccccttaaactgtggttacccccagcccttcattagtgtctcggacttggccccaaaaccaagcagaaatggttttctgccaccctttgcatttcatttctcctcccaccctcggggcttattccaggatcatctgacctgaagcccttcccagatctgtaaccctccctgctcccctgagcccctggcctcgcctgtcctgcagaaactgcgggctgggctttggccctgaaggcctcactgggggctggcagccaacaagggagccaggaggggcaggagggccaagcagccccctccccaggcctggcgccccacccacccagccggcggcctgtctgccttcctgagctcattaactgcaggtcaccgttcagcaggaaagacaaggcgtgggttctgcgggcgttcattagccgtgagaggaacagtgtgtgtgaaattagcagtcacctgaggacctcgataatttcataattaggaggcctaatggctccagctctggatgccaaatgacttaaccccttgcctgctgagctcctaacccccagtccaaggctgcagtcccctccccctgtgcctcagtcctgtttatttccaccaccacggtgcccagcaccagagttggcacaaaggggctgtgagagcaaagttgatggagcaaatgaatgaatgaatgaatgaagacgtatctgaatgggaaaagagcttcagcccccactgcaggtgatcaggggaggaatgagtctccatctgtaggcatagatgtgtggttgtgtgtgtgactgtgtgtttgtgtgcacgcacacacgcatgtgtgggcataagggcacacacacatgtggatctctgctgtccgcttctaagagccttgtgtgtgtctgggtgcacactcacatctatgatactcattctgctgcctcctgtgctctgcaggtgctctgcgatgaggccccatgtgcctccttgaagtcagcctcccttggcaccgcctaaatactggtgactccataatttctatatggagcacttggaaggaaaagcaggcctcgggagcttaacctgaacctgcatttgcatagccaatataccatttttatttagactgaatgttcatttggggggctggtgttaataaagacagggggctaaagccatatcgtttagtatggggagctatcctgacagcctccaaaaccccccagcctctctcagcctgctcttcttcctcccaacctttctgtggccctgaagaggtgggggctgaggtggaaggcagatcacaccggggtccaaaggctggatcaggctctgcctaatctgggaaccaccgattctgaggatctggtgaccccgcctccctccgcaaatggtggagtggtggttggagaagaggtgagtgtggtgaaagaggaggggaatgagaagagggacaggaagaggttgggggagaacaagaaagggatgggagaacagaaggggaagagggcagaaaggatgggaagtcccaaggaggtgagagggaaaaagagaggagagagaagagaggaggggaggggcgaggaggagaggcaaggaggctgagagcattatcagcacttaaaaagcgagcagctcagttcttctttggcacaaataatggctttttatgaataaatcatgtgtcagacgcctcccagggagtgggcatggaggggggcgcgtctgcggggctccgaggctggcggggaagggccggttgcagacccccggctacaggggtactgcccgctttctcctcatggggcccagcaggacagagctgtctctggaattaccactggcctgagccaggaggagatcagcccttcctctgaggtggtcccgctgctccctgcgcaggagtccagcccatcccagggctgggagtgtccctccgctctgctaccctcccatcgcagagccgcccagaagatgctcctggaagggggacaccagctctcatccaccccgagagagggggtgggccaagacaggaagacacacccagagagggaggcgggcagtgcacacaactcacacaggcatggtctctaccacccggggcgcacatgtgggcacactcggagatggaaacactgtcattcctaccacacatacacacatgcatgcgcacacacatacaaatgctcagacgtgtgcacactcagacagggagaccccaaccaaccctcagcccaccctctctcccagcacacttacacttacacacacacacacacacacatgggcccacacagacagatgcatatggtgcttcatggacacacacagacctgcacacgcacatgcatgcgcacacacatacaaatgctcagacgtgtgcacactcagacagggagaccccaaccaaccctcagcccaccctctctcccagcacacttacacttacacacacacacacacacacatgggcccacacagacagatgcatatggtgcttcatggacacacacagacctgcacacgcacagcagccacccacactccatcagcctagggtgggggcagttttgcaacccatctggagcccagacccagctgggctgtccctgagtctgggtgtggggtggggctggggcatcagtccctggagagagctcatctctgtggtccccacccagcaaggatgacacctgccacaccccacagggaggtcctgccatcctgaaccaagaccagaaccagtacaggctctgctggctccgatctccttgactgtctgctcagccacctccagtcagtgggtgccacaggacagcctgggcagctctgccccttgccaggagtttgacctcggggaataattccaatttcatatgcccctgaaaacaaatctaagataggtgctactgccccatcttctagacctagaaactgaggctccaagagtaagagcactgggcatttctttcaaagaccatgccctttcacaaactctaggagcccacagtgtcctggtcttccttctctccctgtgccaaggtgttctgaggtgctcacctgagcagacctgggtggcccgctcctcccactctgcaccatcccccaggccactcccagcacctccgtgacaacctccacactcttgcttctctgacctccctgtccagcccacaccttcctgggcttctgaccttattatccagctggacatcactgggtcaccatgttgcccaacgccagggaatgccattcacgcaatacatacgttcccaaacattccccccaaatctcaaggggtcccataagacacactgaaaagtcagcccataaggctgagcgcactgtcttccccaggactctccctgcgtcagagttctcaggggaagagccctgtctgcccaagtgcccaaccagaatcagacatcatttgatcctcattccttatgtccaacctacaaccaagtctcaatgactctagagccaaaatatatgtgtgaaattatcctttcccctccagccccactgccctcccttgtcccttctcgtgtgagtcaccaccagcacctctggcctagccactggccctctcccattgttgtcccttctggtctacctgcctccctatcactggtcatccttctatctctgagctctggccatgctaaattgctttttgttctggaacccaaatgatcccttgactctggatctctgatcaagccattccctctgtctgaattctttcctttcccagtgacaactcaccctttaaggcttggctgagacagcacccccacccccaccccaggcaccttccctgagtcctcaagcccaagatgtgtgcagctgtgtcattcgattctcctccattcattacatctctgatctaaaattgcccattaactcatctctgtccccctcaaacctcttagttccttcagagcagagactgtgcctgtgctgctctccggcagccccagtgattggtatgagacctggcacatagcaggtgctcacgaaatcttccatggatgaacggatggatgagtgggcacaggacctgtgctgccactttgcatatctcttctcatttactgctcacgaggtgtgccagccaggaaagcaaggttacagaggttgaaaacttgtgcaaggtcacacgactggaaaatagtagaggataaattcaaacagaagtctgtgtgccttccagggcctcctttccaccatcccagcctgccttgccaggccattttcctgctccgactctattttctcatctgtacaatgggaacaaaaattacacctaacccaggatctgacacagacatgctctcagttaatatctgtgccttctcttccaactctagctttttggggacagaatatccccagaccagaaacttcccgcaaggcacatgttcacagaaacaggtggagagtccacccaggcacatctccagcatccagaactcagtaggcgcttaaccaatgtgtgttgagcagataggcgtccgtgaatgctgacacagatgcagacacaaagtcacaatgggctcaggcacagggacccccgcctccccgatccttgccaattatctgcctccgccgccgctctcctgctagcccaaggcgcgggaaatatttaaaacaattttattcatgaaaatatgctgtacaatgcactctacacggcctcgacacggcacacacgcacacgctgacggcacggccacggtacactgcctacgatatgcgccggggacaccgcgcccacagcccgccccgaccggacacttataaatatgggagagaggagccaggactggcacggagaaaggggtgatgggttggggagtggatccagagctgaggctagctggagaggctgaaaccagtactgggggacgggcaggggtggaaggggagagggacttcgaccgggaggggagaaacaagggcaggcgaggatgagtgggaagggctgaaccgtgggggtggaggtcggagggtggttcaggacttgaaggacagctcaaggtgaacagccgataggtgagtgtgggtgtgttttcaggagaggggttcctggcttgaggtgggtgacgcaaagaccagtgggaaagtgtcaatagggaatcagccccgactttgggtgggcgattagtcactcgagagccctaccaatgatactgaggattcggagacgcccccctgtcgcatctcccagtctgcttcccagaccagcgcgtcccacctcattcctccccattcccacccagccgggaacccagcatccaccccgcaggcttcccgtctttgggaggaggcagagctggcctctggggcttgggcaggaatagcagggtgctccagcgcctgcctaccacttccctcagcggtcagcttctgcgggctgtctctagctgggttggggctgcctcctggatccccccgtggagcggaaatgggaatggggacccggggatcaggatgggaagacagaggcccctgggggggtggggtgcggggcagggcacctggggcgcgcggcaggcggccctcagcctggcacccagctctggttggggggcggggctccggccaggccgggcggcggcggcggcagggccgagtcgaagttgaagtccatttcgtcgctgtccatgaagtcgttgaggatgatggactcgacgtcgcactcgaggctcccgctgaacatgtcgaggtccaggtcggccgggaagcggtcgggcgcggcacccagcggcccggcggcggcggcggcgtacggcccgggcagcgcgtctagcaggaggccgccggggggtcccccgaagacggccgcgtgtcccggcggcgccagacccgtcgcgcccgcctcgccgggcagcgtcataaggctgatggggtgggctaaggcactgcgcgagggcgccggcggcgcgtacggggccacccctttgccagggtaggtgccggcagcgcccgccagcgccagctccccgggtgcaccaagcacggggccggccctgggcgcgggtggnnnnnnnnnnnnnnnnnnnnnnnnnnnnnnnnnnnnnnnnnnnnnnnnnnnnnnnnnnnnnnnnnnnnnnnnnnnnnnnnnnnnnnnnnnnnnnnnnnnnnnnnnnnnnnnnnnnnnnnnnnnnnnnnnnnnnnnnnnnnnnnnnnnnnnnnnnnnnnnnnnnnnnnnnnnnnnnnnnnnnnnnnnnnnnnnnnnnnnnnnnnnnnnnnnnnnnnnnnnnnnnnnnnnnnnnnnnnnnnnnnnnnnnnnnnnnnnnnnnnnnnnnnnnnnnnnnnnnnnnnnnnnnnnnnnnnnnnnnnnnnnnnnnnnnnnnnnnnnnnnnnnnnnnnnnnnnnnttttgcacgcggataaaccgggtgtgcagagacaggttgtgccggatggagttctgtggccagagacaaggacaggggtggaggagtgggcagtgaggggataaatgatgggaagaggagtgggagaaaatcgaggagaggaggagagaaggcgaaaagaaacgccaagaagcagaaggggaggaaagagggaagatgaaagggtacagcggggaagaagggggaacaggtgtaagtaccaggtaggacaaactcagaatatccatcccccaccccagaaccgccccaccctccctgttcgcagcccgcacaggcactgtctgtaggatggggccggagctttgggtctagtcttgccagggaggctactcttgaggagccgcctgcagcaggggagcaagacccctctccccaactcagccaagctctgcccggggctagccaggctgctagggccccccaacagattatgtaagggctcatgccgctgcggctcatttgtccgccccccccccccccagcctggcgtggcgccaggagcccgaaaacccagggctccagaaatcaatctcgcggtgactgattaagccctgtttagaactaattgctctttcgtgtgtggggagaataaattacctgctttaatttcgtgtctttaaaatgcaactgcaggtagagaagactgttaaccctttgctggaagggtctggccaggataagcagaatcggctgggtgtccccaaggtgggcagaggcccacattttctccccaattctcggagcttctgcgaactccactccgatcccaggacacccctcaaagcacatccatcagccgtggagacctcaaaccccacagctgctcagtacccaccttcaggtcagcccagttcctttccctccccacccacctgatgcaaagtagctttgccctcaagccccttcctgcacaaaatccccacaaagcaggtgacatcatgcccatttacagacaagaagactgaggctcagagagatgaagtggcttgccttaggccacaaagctctcctgctgtgtctggtccttcctcgggcttcaccttagccacacctacacatatcttcttgtaaatttctgttgggctccatatcactgcctacttttgccaggcctggcctggggacagagggaggcaggggagtccacagctccactgacctggctcctcacagagaacatggaggactagaactactgcagagcctaccacgccccacctctggggcctccctgctggaggcctggactccctggctctggcactgttgtggaaatagcaggggtttgggtatctgaagggctgggcaggatgcctggctcttttcagccacctagctatgtgaccatggctgttgactcaatctctaggagtgcatacctcagtgagctgctctgaaaaaaatgggcaacatacagtaaccacctcggaaagctgttagatcattacctgagataatgtgcatgctaagtgtttggtgttcataaatgttggtcaaatccctcactctggccagaagacctcacttcttagatcactccacagacttactccttctctacaattcttaatatcaggccctgagtgtacctgcgctgggcacaaacaactctggggagctggcattaccccatctcctgtaccagggaatggaggcccagaggcatgatgtaacttgcccacggtcccacaggcaccactccaggtctgcccagcatacggacctgctctcatccccccagccccagaacctctgatccgtccaggctctccctgctgcctccttcccacctgactgcaggaggggtcctctctgctgcccagggcgcccacttgcccctcacccccagcaccaggcacgcacctgacttcttcagggccccaggctccttatctctggcactttctggtcttgggagacaacagctggggccccaaggcccctcccagcattgccctgcctggctcctcctggggccctgagaggaggggacccagacccccagggagtggtgctccctggagtagaaacccccctttcctgctcccgcccctgcacctggctccccagcccctccccaacacctgtgttcagggacctctgaggcctcagttctcaacccctgtgggactaactgcctagccagaggctccacctcgcagcccctccagctggaggtcagtcaggccacacctctttatccatgtcactatgtgccagcccggttctgagtgctggagggtgggaggagaaggaaggatgtcaccaagtagggcatctcctgagtacctgccgggtcagccctggtattgggagtattttatcccattctcagtactttatgatcattctgtcagtgttcatataactcagggactgtgacccctatctcaagatgttctagggaaatagcaacccactccagtattcctgcctggagaatcccacacacagaggagcctggcaggctacagtccatggggttgcagagttggacatgacttgatgactaaaccaccaaccatctcaaggtgaggtgactgagagagattacgtaagttgtcaagatcatacagttttaagtggcagagccaggcactgatttcaggttagactcactctgagtctaaaggacctcacattccaccatgggagagagaacaagtcagagaatttccaaagaatcttaggaaaccagtcctccatttcttctcaaactttccatgatgtaatcaaccctagaagctggtagcatgggaagctgggggcatgttaaaaggtcaaaattctctaagagtcttgcgtttcctttttagaattcaagggaatcttggcttgtattccacgagacttccaaattttctgaatatcaatacaaatgttttagatcaccgtcaagaacacacattccaggcctatgaaggtctctatccttccccactctgttccttgcccagccaggtacccctaagccccagcctgaaaccacagctggttggacccagagagaaaaaaggacttgccctgcatcacccaggacctggtggcagagctgggattcaagcccaggcctcctgacctgcagcttggtgctcctccctgtcctccagcaagcctgatctggggccactccctcttcctctctgggcctgtttccctccccagaaattgatgagatgggccatgcactctaggcacctttgcagttgacaacgaaaagttcttggaattgttcaggccaggggttttcaaacttttttaagtagtggaactcttgtagtaaatggaatctaacacaaaacatgagtgttccgcactcaagccactggggctggggtgggggtaacctggaaccttttctgctcagcaccctcccttggcactctcacagaaaatggcccttggcgaggaattctgcaggccacctggatggggttgacgcttagtaaggtgccattctttgcccaaggtcacccagggaggtggcccagagctaggtgaggacttaggccttggtctgctgagcagggctcttcaccaggtgtgcaccagggctgtgccccaggaggccaggccaggccctgcagctcattctggctcctcagggcccagccacctggtacccatcagagctcccggccaagatcctgtggcaagcactgatcacatctcacccacacaaggcctcctgggaggccagaggccacggaggaggtgagggagggggggcagggagacgcctctgccaggtagcagtaaccagggttccctctcagagttgcctagcaacccgccaccacagccaaggccccggcatgcccaggctcccctggtgcccaagctgggcttctggggcctcacacctcccacaccttcatgcaggcctggtgcagtttccaggatgggacctccctgacttggtgcctcagcgagactatcgggggtgggggcagagggaagggacagggggttacatcccagcccctcctactgtcctgcagaacctgggtgagaggccagcctgctggggcctcagtcaccagggcgaggaggctggtgcaggacaaagagcagggctctggtgttggatccagattccagtcgtggctctgacacccacaagcagttgagctgcatgctttgaacctccagttcctcaaacaggctacctgcctccacccttgtttcccttgagccttccaccaggcagcagccggagggatcctataaataacccagatcacggtccagtcctgcccagaacactcatatgcccccatctcactcagagtaaagaacaaaggccttaccatagcccaccagcccctctgtgacctcctaggctcctctcctgacactgtcctgcttgatccctcccattcttcaaaccttccaggaacctgccaggtaccatcccaccttgcccagatgcccatgtccatctctcagctcaacaaagtctctgttgagatgccacctgcgcaatgagacctatcctgtccgctcttaacagatgttcctctgccttgccgtttcttggctccctaaccctgctctgagtttttctaaaacaattagcactttctaaagtactgtataatttctttatattatgttcattaatttgttatctgggttcccttattttagaatccaagttccatgaagcatttctgtccctttctttttcttaccagaccccatgtgtttggtgtatgccaggcgtttcataaatgtttgttgagtgaatgaatgagagacagcaaaggagggtaacatagtcttgcagggagaattaatgagattggcagagtgacttgcacagaataggggctgctccaaactgagagaacacaggacagaatgggaggcaagcaggggtagagaaggcaggagcatcctgggccacagaaggaagcacagagaggaggaagggcttcggtgagagggaaagtagggctcccagggtgaacaaggcagctgcccaccctggccccctacctgctcgctcctgctgcccgaacagatctgggtaacccagggcttgctgcggccaaggtctctagcagcctggaccatctgagccagaagatgctccaggagcccccaggggaacagaataacctcgtccttgctgatggtgcctcccccatggacagggtctgagctgtttggtggcggcagctcatccatccaacgggacaccctcatctattcccaggacacccttcgcccacgagcagtaatgcattcatctgacaacacaaccccatttatccagcacaccagtcccatttatccagcaagtacaacctcatttgctaacagcactccattcacctgacgggccccctcatttatccagcaggacaccctcatttatcctccaagtcggaggctctccttcctcctgtggtgtggctgtgttctctgatggtgcaacccgcctgatccagcaggacgtcatctctcctacaagtacacttcatcccctgatactgcaacctcatttatctaataatgcagcctcaccttgcctccaagtaccacctcattccttgacagtacaacctcgtttatcttccagctcaacctcatttctcctcccagcacagcttcattccctgatagctcaacctcatccaatcttacttctccagccagagcccagcagatctcagggctggggagtgggggggaaagaggaggggtttggagcaagaagaagggtcccaccatttgctgtccctggcctatggagggctgcctggcactatgactatatccaatcttcccaggcccctggactttgagttctaggttgcatggtccagccagtgctccaccattgccccccacctcctgtttggtccccttgatggctaaagagaatccacaggatggatttttttttcccagctctccagcaaggaaaaaactccacctgattagatttgtagcatttgctggtttctgtggcatgaatattcccatcgtagccaattttaagctggcagcatgatgtcactgagcgcagaactgggaagaagttctccctgatcagctctcacgagccagtgcaagcccactctcacacaccactggcacacactcacataccaaggcgggagaagggcaccacctaccacgtgccagacctaagctaggttcttcagatacatttcttctgtgaattctaaaagccatccaaactgtggattcagttcagttcaggcactcagtcatgccgactctttgcaaccccatgaatcgcagcgcgccaggcctccctgtccatcaccaactcccggaattcactcagactcacatccatcgggtcggtgatgccatccagccatctcatcctgtcattcccttctcctcctgcccccaatccctcccagcatcagagtcctttccaatgagtcaactcttcgcatgaagtggccaaagtattggagtttcagctttagcatcattccttccaaataacacccaggactgagctcctttagaatggactggttggatctctttgcagtccaagggactctcaagagtctttctccaacaccactgtggataggtaatgctattttatgaagtgggggtggagaggggaactaaggctcaagtaggttaaatgactcctgagaccacaaagctgggaagtgatggagctaggtctgggtctcagggctcttgtattccaaagccaaggttcttctcactcacatccctaatgaggtggggaacgctgccctgctacccacctcagtggccatccctgccttgattctcaagcccaagcttcctggctttcatcagagacaggagacccaagtgttacgctgcccacccataacaagccctgtgctaccccctggcctctagtaccgaggggatcccaggactctcccagttcagtcccggatcttgtgtccatccatccaacctaaaaccaggtatggttgcctctccaggttccattgctgtccaaggttctgcctggccctgccctcaggaagctggccccacctacccaatggggatgtgacccagctcctccctttggtgcctcccagagcagagatcacctgtggggctgcatgagtgctctgattccctctgtgactcctgtttcctctctccttccttccttccctcccttcctgcatgaagaaatactgagggctagaattggaatcccagcctcatccatgtgaccttgagcatctcctgtaaaagacagtaactatcccaacatccatgggaaagggagtgaggccgggaagggcatgacatcccacatcttatgatcttatggagtccctatctcaggcccaggagcaacccttgtaccaccctaaatcccccacccacctctgacccaggaacacacctgactcagagagagtcacaaaaccgggggttgggggtggggaatctaggtaaggaggagggtcacttgctctgctgcttggagtactcagtccagacagacttcctgggagaaggagtgacctagatgacctcagggccctgaggccacatgcaaacccttggtactagggtctgcagggaaggaggggtggaagtgcaggcaggagcatcagagccacaggtgttgacaggtgaatggcttggagtcattagtggaacagaagtgggcagccaggggccaggaggaaccaaatagccaaagcaaggcaggaggtcaagagacaggccctggcatcccccacccctgccaccccagagacaacagagcccacacactcagcctggacagcaaacaagccaacagcagaagtcccagctcacccctactcaaagacccagggctcctcatcctccagactgacaatcaagggcctctgatgctctccagcctcgtcacctccattgcttacacccacctggaactccagccaccctggatatctcacatttcctgcctttgcacactgttccctgtgcccttctctctttctctgtgcacctgggtcctgctctatcaaggcgagctttgtggtgtctttcccctctgcaagcccccaaaataactattccctccccatttctactgaaaaaatctacctgtgcactagagtgtaattgtggatgagtctgcctcccaacttgaactttgtgggcaatccttggctcacggtaagtcaatacatagattggaacttcacggtaagtcaatacatagattggaactttcagcagccatgaaccactcaggcctggcaactttgccatttctgttccgccaaacctcaggctgaagttccaggtattggctcctcctcctcctggtttttcctccagttcctggtgcctctgccacctccctactctctgctgactcctccggagacttcaacaagtggagaaggaaagacactacgatttgctgagcattcacacacacgctggcactcaacagtttaagtcttactgagtatctgtaacaaacctctgagttagtttattattctgattttacagaggagaaactgaggcttcagggaacaattgacctgctccagggataagtgttgcggcaggaattcacaccagggtctgtgctcttccgcctaccctgagacacctctaggcgagcctaggccagacagaaactctcctggggaaagggtgccaggaactgccacgctggctcagcaacccctgcacagatctcctctctcttccaggattaaaggggatccccagttgccaagccattcaggcccctccgagcccctcctcattctgatcccctccctcactctgctggcagcacctcccacacccctgccccaggccttgggagcagctgcagtgacctcacccggccctgccctgagcccagctctggggagggcttagcagctgtgccccagccctgcaggcggctggggggcagggggtggaaaggaagagtgggcatggtgccaagagaaccatctgctctcccaggggcatggccacccgcacagacactggcctcacccccaggggctgcccttggccctctgtccccatgccaaggggctccaggaggcctgagcagcccacccagactggggcagcagccctcatctgccatctgtcttctcccggagcctgagaggtccttgcagggcacattggagcatgaatgtccgctggaaaatgaacaagtgcttggggtaagttctagggggcagaggccagaggccagggctgggtgtgctgagcgctgcccgcccagccccagtcttgtcaagccaagagcaggcaatcccctgggggatgagggcctccatcccctcacatctgctcagctggcaggtgccgctggcagagggcaagccccttcccccacagccccagctcaggttacaaaaggaggcaaggccagctgaggacagggggaggggacaggaggggtggaggaggcctcacagcttcccagggtattgggggaggggagcttggatccctagatgggacttagagccagagagggaaggaccatgcccaaggtcacacagcctgccagtgggcaaagaggagccagcatctaggggcaggcagtgctgagttcaagggtaaccttgggtaaatcactgccctcatttgtaaaagcacagggcctgaaacctgcctgcttgccctcaaggcctcagggaaagctctgtaggctagagagcagcatatggaacctcctgattccctcacaccccagggacagaaagggagggactagaagaagtcttgcccccacccccaacacacacaagtcagtgtctctcagggatcagggcccaggacccccaccctacccagggcatagacagtcatctcctttcctttgccagagcgatgaacaacaataacagtatttgctcagatttcactggggactttacatttaactctcctcagatgtaattctcacagcaaagtttggacatgtcttatcatctcattttgcagaaggggaaactgaggcttggatgctcaaggctacacagggtgagtggcaaaactaggactgctcctccctgcttgcctcaagactcttacccgcactctgtcttacctctgagatcctcgacgcaccaaagggtgctgcctggcacttcaggcctgggatcttggggcctctactctttctcagattcatcttctatcctggatcgcagtatgaagtccacagtggcccctgagccagtctcttcccctgccccaaccctccataccatcctttctgcccatgtcatccctcatcccccacagcttggagtgccaacttcttggtgtggcattcaaggccactcactcaccagccagcccctgcttgcttctccagcctcaagtgctgctgggctctggctaacatagctagaccctgtgaggctcccaaagaatcctgactgagggtttaacttttttgcctcattctcttccctcacctacaaatacccacagcgaattatctgtccctccatcatgaccctgggtcatttttatcctcatcttatttccccagctggacctgcaggcattttgagggcacagagccagtccagttcctctgagcagcgctgcacagtgggtgcccagtgggtgtaggcctggattaaagtgagtggaggaagcagccatcagccccggggcctgcagatggagagggggccgatgtcagctccctccctctgggagctctgggttgcagaaagggagtcaggatcccagagccaacccccaggctggaagcctcagggccaaactccaagggaaatcagagagacaatgttgcgggtggaggccagcctgcactagcctggacagagcactgggttagggaggaatggcccatgggagtttcatctctgtcactgccagtgggatactatgagagcctactttgtgtctctcagcctcactttcctcatttgcaaactggggacagtagcggtaccagcttcacagtttgctatgaaaattaaatgggagcacgcctgtcacggcccatggtggctgcatctccagctggaagagttctgtgtgtggctgaagcaaaggtcagaagacagggctgagtgatgtggctcgagaggttgactggggccaggaggccaagacctggagtggctaaggccccagaactggtccctgtaagaacagcacacgtggtctcacctcccccaccagacagggagctagcagagagcagggactgcgactttccggttcctcacgggccagcgccaaagaggtctgccgaggattcacgccatgaccgttcccctccctcctgcagccaaacgctctgtggcggagcacaggagacacggagggcagaaggcgggtgaatggattctggggggtggggggtggtgggagtggtttcagtcccttgaagctgactgcatggggctcaactcctggaggacccagaaagagtgaggaagagaggtgtgggctcaatctgggcagcctgcttggaggagaaggtggtccaccctgggaacagaagacaggagggacaagcaggagtcaaggaagataccatcgaaggcatcagttcagaatctgacctgtcaccagacggacctgttaaaatacagatttcaaagctcacccgctgacagtctgataagagggtctgagacggggctgcagactgtactataaaagcttgtaggtgactcagatcaccagccagctctgccaacacctaaggacttaaggcaggattctcagaaagacacattgggtttcagaatcacctagtaggtaggtttttgttcaaactacccaagcacctgcctagtttctgaagggtgtccccagggatcagcccctgagagtcgacagcagtcttggcgagcagttgacaatggcagtggtctgggttggcaactccagtgtcaggtataaagatggcagtgtgagggcagtgtgggatcgatcagaggcagcaggggcaaacaggagagagggcggggcctggacacggccagcagagggcccaggggcccgatcagagcagtttgggcttggttggctcccaagggaactgagtagccctggagggttctggagtgagcatgagtgagccctggggcaggaggactcattgggatgtgggctgacactgcaccggcattgggagatggtgacacatggtagaaacagacaggtctgcatctgaacccaggctcagcctcgtttcagctgtgctgccttggcaagagacttgccttagaagagacttcgtcttttcctcaatttcctcagctgcaaaatggggctattatcacatacctggcaggacccagggaggatgaaatgggaagatttatgtgaagtgcccaactgactgcctagcacccgggagttaattctcttaattcttgttccccttcccacaagaggcacccctcttagagaccagaaaggtttctctgcaaagacggaggccctgggtggggggagggcccgctctnnnnnnnnnnnnnnnnnnnnnnnnnnnnnnnnnnnnnnnnnnnnnnnnnncctcccccacaagccacctggcccccctcccacctccacatatgggttggggggtggggagaggcagcaaacagccaaaccctcccaaacaggagttggtttccatggtaacgagggtaccaggaggaaggggggcgctccagatccagctgtcccccctgagcgccctacccgggccccagagcctctgctgatgcccacctaacaccctggacccccatctgcctgctctggggggacagctgggaccgccacgagcactcccttcactgtgctcagagtacgtctgccacctgggtaccgccaggggcagggtaggcagccccaagcaggagcccccagttcaagtccatccacactgctactcactgcgtccagccacgagaagccccatcagtactctgcgcccccaggcccaactacccatcatggctcttagaacgagagggtttatccagttacagctcccaaaagggccagagactgggtgagttaaggccctttggctatggatgagaacacagaggaccagaacaggagagagctttgctccagttcaacacactcgagatgacggtcctctacaggggctgtccccacccctcacccactcccaactccacagctccaacagaccctgaggggctgagctagggcacctggcacaatgctccagagagatgggccatggccagagagaaggaagaaaggcctaaccacccaaaggcctgtctagtgacagaatgggcagtgctggaggctgcaagctcccagcacctcggagtgtgtgagaaagggagtaatctaggaaggagccttgacagcaggtgatgggctccatgactccccaactctcctggagacggaagtcagacttggacgtgataggaggaggcaccaacgtgaacctgtttctcggggacacatccacaagatggtaggcaggccacaggctcagatagggaaggggtgctgaggagtcagctgcgaggtaagggagacagtggcggcggggcgggggcggggggcggggctctccctgctacagccataccctagaagccctcaccgaagccttcgactacacctgcactcctcacaagacacagaggggcttccaaagctctttggaccccatttagcggccaccaccagccaccactcaaaagataagagaaggtgggctgctagaaacaagcttgccccctttccaatccctccccaccccagccctaatggcacaggaggaaacacatgagtttggggtgtataagggggttcagttctcaggtctgccagttcttagggaggtgatcctaagacaagtcttctccacctgggaaagtgggatgctaataccagcctggaccggtgggcgcttgctccccagccctctgagcccttccccttctctggcagagcccctccactccactcagttctgaagctgggttctcagggcctgcagacaggggagccccaacccgcagaaagtgggggctggggggggcactgaactttcgaacctgcacacccccctccccgcgccgttcattaccttaacaggagttaaaaataaccgtctcatctctttaaattagtctgtctgcaattaccgcctggcacggcgctgcccgccatcgtcccgctggagcggcgccaggtggcaggcgggggccctcaccctgtctgtcagtctgtctgtctgcctccgggtccgcccctccttctcccctcagaggtgcagctaccccaggggcctcctggcggccctgcctctcgagctccccaagttgctggggaggggcggcccggggggccacgcacacggctggcagaactgagggggccttcgttgaacagaggactgggaggggatgggggcgggggcgggggggcgcggtagcgggggaggggcgccgggaggcccgggaagccggaagggcccgccgcgcgccagcgctcgtgggtgggtgtgagcaggtggccgtgggagtctgccgggcgtgccagcaactgtgccaggagcggctggcacgggctcgtgcccaggaggcgggcagctgccagccccccgctcgtgcagcgcggggggtgaggacaccccccaacccgggctcacaccgcctcctcccacacccccaccagccctcggggctggggatccccggaggacaaaggaggaggagggagccctgctggaacgggctgcggggaggagagaagggggagctctgcaagcaaaccactgctcagccgggctgtcgcaggaccctcctcctggcctcagggagcagcccctcccttctataccccaccccacctaggacctactggccagcctgggcgggatggggggtagggcaccacccctcctgatcccaccccacaacagccaagctgctccaggcactgagggagaagggaagtccccctccacggggctcctccccacccatcctggggacagcaatgggaggcacccaggtctggcctgaaagctcccaggggagctggcagccaggaaacacaaaagcaggcagaacaactccaggggtgctaagtggaaggagcaccaagatccagagtagcctggaaggcttcctggaggagtccagcactagggaaggaggggctagagtgtcagaggaagtgggagaccctacttggatggtaagggacagggaggcctggcacgctacagtccatgggggtagcaaagagtggacatgacttagcgactgaacaacaataacaacctggatgtgggacagccacacttccggaccctgtagagggagggagacttcctgtccaagccctcggccccggacctggagaccctatgccctgatggcaactcttccagcctctccggcaccaagcccagtctctcttcgggcttcagcctgctgggtgccttgcgcctgctgatgatcttgcctcctccaattcctctctgcaacacctctgaactgtcatcccacatccctggttgggccacagggcaaaagtcaagcccttcctgatctggcccactcggcctttcccatgacacagccctgccccctccaggagcccttagttccagcctggcacgcccaacagtctcccaaacccagcgtatgaattccacctccctgtctttgcatacacagtcannnnnnnnnnnnnnnnnnnnnnnnnnnnnnnnnnnnnnnnnnnnnnnnnnnnnnnnnnnnnnnnnnnnnnnnnnnnnnnnnnnnnnnnnnnnnnnnnnnnnnnnnnnnnnnnnnnnnnnnnnnnnnnnnnnnnnnnnnnnnnnnnnnnnnnnnnnnnnnnnnnnnnnnnnnnnnnnnnnnnnccttggaagtctttcccccaattctacccgccttccccacccagtgaagacagaccagactgccacccagtgaagacagaccagatagagtgccatattctctgggagggcttgcctggctccccaggggatctccctgctttcaccacacccctgtcccccagccctgtcccccccagtccccaccccccagcccttcctgcctgtaaaacgcagggcttgggtagccgtgatgcatcctgaaggtaggtccaatgcctcccccactggtccccccactctatctatcacagggttcagtacacggcaggggctgaagggcaacacttatgtgggggaggggagggaagaaggaacaatgggtccctggccccaaccctggcacctgaggtgtcccataggctctgtaaccagagggtggctgggagttgggaatggcccctccacccagcccctggagggactgactgggaatgggggaacaggtggtgggaggggcgggaatgagaggggaaagaggctccctggggagctggatgcaggtgggatagaaggaggacagccattgaggggatgagacgggaaaggccagaggtctttctgaacagccctcctccgctgctgcgggggtctctgccagggtctaggtgaggagcccaagcctgaggacccctcaccaatgccccagcccagggcaagccttcctgagcccaggcacagggagaagcagtgtgtccccagcagtgtggtgcagaggaacccgcatccaacgggcaggcgggaggcctgggccatcatccagggcctgccgctcactgatgacctaagaagagtcccattccctgccagggcctcagtctaacagtctgcaaaatgaactcatgggactatattatctccaagtaccttcccaatcccattctcagatttagatccatccctgtttgaaagttgccagtgtccccctgccacacccagggcaagcaggacactattccagaggctctgggtccctggagggagacacacagagattggaatccagctttcccatctactgactgtgaccttgggcagtttgcttctccactctgtgcctcagggcccagttctgtaagtagtgacagtaaaacccacctcaggcagtgcagagggcattaaaggtgacacctggcgcagatgcctaaagctgcctggcagagggcttggccctgagaccctcagtgcactgtagttttttcccaggttcaagcctcatgttccctcttgccatcttccccatcatccctaacccttcaactccaattggagctccgcctcctgcaggaagccctcctggcttgctctgactcacagtatcctccctggtctcagcaccctctgcactatccactcactcctttactcttttaccagacatgcactggtagctcctggtgccaggctctatgcttggtgccatgggcacagagattgatctaaccactgccactgttttccaaagagggtggggaagggaaatgagacaggacacaaaagactaagacttatgacaggtagggagaggacctgagctagcgaaaaggggttaggaaaggcttcctggaagaggtgtctgaactctgcccttgaggacaggaattatccacaaggagaagcggagggtgggacagtgcaggggagggaggtgggagcaaagcacaggacccacttaggaggaacaagtgttctgctgggggctgagcccagggggaccagctagaggatggagagaaagactcaggcctgctactccagcctgcgtccccaccccgtagtggccagagagacagaggagctgccagcataaaggctgagagccatgggctcccaggtcaactcccaggtcaacacagccaccgggcatctcgtgctgttcatgtccacaagcctcccctcctccactggcacacctccttcccctgacactgcctaccaccaccagccacagcccttgccctccatttaggcatgtctccctcatagagaccccctcttccacagggagcctgacagcttacaggccctaggcatggcctgaccacccctaccccccagcctcctctcctccaaaggcattgactatatccattccccaacaagttagccaggggaggatctggaggccacaatccagtcaagaccccgtcctctcccaagatggctcccccctttccagtggttggtactgaggcctccctggggtgcccctcccccttcccccacccccaaatgcatctgggctcagaaaatcagggaagtgggagacagacagcctggggtgggcacagacagatccccaggtctcaacaccctgccctcacaccagcaggggtcatcaccagcccaccatgctgatccaggcaagggggggacagcagctgccccatggagaactcagatcacctgaccagttccccaccttagactggctggtgccctagggtgaactcctggcactacagaaagaactgtgggcctagggtcgcattcctcaccctgaggccagcttcagggagggcagtgggaaagatttgggaggaaagcagccaccggcccggtcattatttcagctctttaaggagggtgccctggtggagagggtaaaacaagagtaacagaaagcaaactcgggaggtaacagaggggtccccagtgtctgaggcctgagaataggctcttctgctatgcccccaaggatggggtgagggtatccctcgggggtgcctcaaagtggcagtcccttgtcaccctaccagacctcccaccctgcatccagagcatgcacacagctgctcccagcacgcccccgcctgtctgccggccggccccacgccctgggcacacactctgtgacccctgggggtgccccagggtttccctccagaccaactaccgggtgcccagggacatctagcagcccttggaagccccagccaacggctctagcacccctcccagccggacgcccccaccttccagccggccgagctgttgctgtcgcctttatccttgaagtagggcacgtaacggaccatccagtcgtagatctgcgagagcgtgagccgcttgtccggggcgctctcgatggctttggtgatgaggtcggcgtaggacaggttcccccacgcgttccgccgagagctcttcgctttccgcagcggtccgacctccgcgcccagcggcggcgctggggccatcggcggggccgtggcccggcgctccggcccgcagtcctcggcgctctcggccacccccgaacccagcgctccgtcctcgtcgccgaccaagtcgggctgcggcaggggccaggtacacgagcgcggccggctctgcggcgcgaagtccgggtccacgtccacctgatgcgctcgcagcttcgcagccatggtcccgcccggcttgggcgaggaggggaggggggctccgcggagggtgggcgggcggctccgggatctgcgcgccccggggaggcccgcgggaggggtccctggcggcgccggctcaaccgcggggcgccatgggccaggtcgcggagacagggggctggacgcgctgaaaagcccgaagggaggaaaagaggggggcagtgagagagcggcggccccggagcccaacgggcacacacctcgccagccccgcttctagcacctgccgcctgcttgtgcctgcagccaccannnnnnnnnnnnnnnnnnnnnnnnnnnnnnnnnnnnnnnnnnnnnnnnnncctgcgggctggaggcggaggcgcggggctcccggccgggggcgaccccgccgcagcccctgcatgcaacagcgccgcctacggagcagggaagacaaggcaggcgcgaccccgccccctgctttgctctaggggagggggcgcgggggcggggcccgggcactctcattggtccgaagcagggctgtcccgcccacggactcggctggatccctcccctgagcgcgtcagcgggttattgttacaacccggggtttcccggggcaacagggatgaggcggggctcagagcacatggccccgccttctattcccgggaggaatgccccgccctctgtttctagacccttggtatttccaaatcttcgttccagaaacctggtggggtggatgatggagttcttctgttctttgtgccccgggctggggaaaaggagagggtcaagaacacctgggttctgggtcaggcttggccacaattttggcttctccatctgcaagttgtttttcgtaggcattcagagtgcctggtttaacgtgtagtagaatcaacctggagagcttgttgaaacgttttactgggccccagccagattactgggttgcggcttgagactttgcatttctgacaaggtcccaggtgatgcacccgggaccacactttgcaaaccactcttttagagtctgttgcaggctgttgccagggttgttggaacaaacacttgcctcaaatttcatcctgtttggggagaagtttctcgttcacttactatatttattgagcacctttgatgcatgtgcactgttccagctactaaggcgagagcagcaatggagacagatgaggtctctacagcataggctgtgaagaagtcaggtgttgtcagatcactgtatggcctcagtagtagagaggccagccgagcaattgggcagcccatgatctcatcccacagggccctaggctaggtttccagccaacactccacctgccagcctttgctttgtgtatcccctctgcctaaaacaccctttcccccactcagaggctgtcattagagattctcccatccctcaaaactcagcttaactcatccctgatctcttctttaacccaactcccagcactgtccttgtccattgcttgcgcagatcactgtcttctctgccagtaatttctgtgtccctctaggacaatatttctcttttgccaatcaggaaactgaggtccagagtgggcaagtgaattgcccagatggaatggccaggattagactcagactcaccagccagtaccacattcctggagaggctggacactgcaacttgcagaaagttctctgtgcaggactgggcccaggccacaggagacagccctctccaaaattccttcctttcagcctaggtcccaaggagtagggccaagggtgaggatgggggtggggccggagaggcccctccttgccaaccacccccccactgccgagggtgggagcaggtccagcttgcaaatgcctggcgtggcatctgcctgagtcacattccgaaggcaagggtgggcatggaaaccattggctgcccctcttctgcttacgtatacacaccctccaggtggttcagtttagagacacaagggccctgaaatcattgctggactccctcccacagttctcatatgccctccgtgcccatgctggaggctgccccctcaagttccctggaagccaggcaggcctcctgctagtcttcagctctggcttagcctgctctgtgagatggggcctgctgggggccataccagagcagggaggatccttagctgggggccctggcacaggctgctgcgggactgggaagccaggttggcagagatgccctaaaggctgactcaggctctgctctggcccctgccctacccagtgtctacagcttctgcctggactctagtctgggtcccacactgggcacactcagcccccactttacatagacacacacattccccaccatgtacacagacactcacttttctctactcacaacttggttcctgctcatatgttcattgtgaggcagtctaacattaatgattaaagtatggacaagttccttaactgcccaaatccactatttcctaatctataaatgagtaacatcatagcacaagttcagaggctatttggagaattcaataaaatcatgaatgtcagcatcaggctcatagtaagtgctcaataatcctagcatttttttattactgtaggtgttaccttccctccgtttgtcccaggtcacattgtcccacctgctgtcgccacacacatgatggtgtccattcacacactcgggcttgctcgcaggcacacctgtctatgtccctcatacatgtgtcccaattacatagaccctcaagttcctgtggtcccaaccccaggactctcgtccactcccttcccctcccccacacctgccctcaagctcccaattaccctcgctgctactcccacattcatttctgctcacagacaagcccctacttgctcaccctcgctctcctcccccttccacacacaggcacgtttgcttctgctcaaaccttcccttggacttaacacacttgcattccagtgcacacacactcaggcacactcagacacctgctttaccgggtcagctcgtacttggatcacaaaacttgtgtacatacatacatacaccagacaatcccagggcatgtctcgtacctcagcgggtccatccctcccagcgatgagcacgtactacccagctctcctaaggcacactgcccttggcagatcccttctcaggccacacagtgacactactgtcacccccgacaggactgtgtcttcccagctgcttcccctcctccagtctcactccccatgccctcccagctctcagaatagcccctgcgtctgtggccaccgccacctccaccgctgccactgctgagctgtcaggacccgccggagcctgcttccccagcgcagtgccagctgtcccggctcactcggggcaagtgaggacagaagggcaggctttgctgaggtctgacgggcatagctgctctgcacccctggaaacctccttccagaacccacctagaagacagtcagctctctggaacccactgccactcgcccagcacattcccagtccctgaaggattttgcctgtgtccctttttatcctcaagagcccagagaggactgcctccccttcgtggctcagagaagctgaggtctggggaggaaggagtttggtcaaggcagagcagagagtcgggagcagagccaggccaggaccagcccttcctagcctttcctgggggatccctccttaaccacacagttatcaagaactgcccccctgtccccgcctgctgatgctgagcagagcctggtcgacatctgatgccacagttgtcaggaaaagagaataacacaggggtgatgtctggggatgcctctggagggggaggggctggtgcccagctgaggcctccaggggtggaagagggagagtctgtaggagccagaggggacatcaggacagctgggagagcctccagggcaggctcgggcctggcccaggaccacgtcagagagtgggtggggctgagctgaggctgtgtggctgaggggggcagcgcagcagggcagggctttgtgacaagaccacggctcctgcagttgcctccacagtgccggcctgggacagagagtcctgctggctttagggaggtgacttagaccagctcaatgcccccaaacatgagcctccaaccaagagaaccttgtgtcctcctgggccagggagctggaccaccaccaacagtggcagagaaatagtgctgaagtgaagaactcttgtaggtcaaacctgtcccacccaccatcccccttcaatcctgtatccttatccccatcaatttttttaatttatttttttattgaaggataattgctttatagaattttgttgttttctgtcaaacctcaacatgaatcatccataggtgtgtatatatatatatatatataatggcatccgttcagtgccagcccctgcagagaccctgccaagcatgataatccttgggggcaagaactctgcctatcttgttcgcagctatacccccaggacccagagcaggggctggcacagagacgttcaataagcatttgttggatgacagaataaactcattttgttctcacaagcacctgagaggcagacactgtcactcccattttctagatgaagaaaatgaagctcagagaagggaagtgagtagcctgctttcctggaactcaaactggagcctgggtttgctcctcgccaagcactagagacaggggaaaactgagctttgaggccaatcgtttcccttctctgagcctcactttcctcatctgtgaaatgggactatatttacatgttggggatgattaagtccatctgtgtaaagtcaaatgtcagacaaatgtatgctcctttcatccttctcctccttgagttagccctgatagtctaaacttccacacagccacacctgggacacatgaggattgcaagtctcccttctttctgtacaacaggaaggaggtgtatttgtctgctggggctgctgcaacaaagtgccgaagcggcttaaaagaacaggaatttattgtctcacagctctggagactagcagtctgaaatcaagatgctggcagggccacactctctctgaaggctctgggggtgagtccttcttcgcctcttcctgcttctggggcttgccggtgatcctggcagtccttgtcatatagacacatcactccactctctccctctgtcttcacacagcagtctttcccgtcccttctccctgtcttcacatggcgttatcctctctgggtctgtctcctccttatgatgacaccagccacactggatttagggtccaccctactccactatgacctaatcttaactaattgcatctgcaaagactttgtttcaaaaaaaaaaaaaaaaaaaatccaaagctaaggtttcaggaagagcgtaaactttgggggtggggaacactattcaacccactacaagaggtgtactagaaaaggtggggggtttggggacctgcaggaagggcttcagattctgcctctttcaccaggaggctggactgtagactgctctgagtctggactgtagactgcactgagtcttgtttcttaccatgtagagtgacgacagcaactctgacctcccagggatgttgaaaggaaaagatgaagtggggcttgacagcagtgccgggcagaagaccccagcatctcactgtggcctcacggcccgggctggccctcctgcccacgtggccttcctcgggattgtcctggcttggcctgtcatcttcctgacccagtgatccgagcagatcactggacgacagtgttctgctcctcactgctctgttcctcagagcctctgttttctgatcaaacaggtgagaggcctgcatcagatgatctcgaaggttccattgcaagccaacattcacagtgccttgatatctcctcacaaaatgctaaagtcgtctggaattctgtagagccatggctggtcagagaaggagtcctagggaaaggaatgaggtttctaggaccttccagctgccccctctcaccaggtcccccgaggcccatcaggccatgaaggcagcagacttcccaagccagtgagcctctgcctgtgaggagcccacagacattcacccagagccccctgggttggctgcttctgacctcggcagcagccccagccccagccctggaggacagggagctgtggacacagcagtgaatgccagctccatcatggactccctaggggacctgggcctggtaccatacctcagtttccccgcctgcaaaatggagatgcacctaccaccagagtgggcaggagaatgaaagatgacatggagaaggagctgcgtaacctccggggcattgtaaggaaatctatccctgtggccttcagcatggccttgccctctgtctcctgggcccatcactgcctccccagccttattctcagacttaggcccctctggaatgaagcatgctgggaagaaaggccatggactcccagcaagttagaagagtgacagcaaccagccccactgatgtgccagctaataggaggaggggggaggctaagtaacagaaggcctcctgtgtgccaggcactgggccgtatgcacctgctcatttcatcctgatggcctcactctggagccattggtgctattcccattttacagatggggacactgagggcatctgctgaggaaattgaggcagtatctgctggagaaaacttatggggttgttgtgagtatgataacaataataatatttaataaacatcaccctcatcatcaccatcattattatcaagtgcttccttatcttacttatttatcaagtatagcctctatgctaattgattccatggttctctcttgatccttaaattaatcctaagaggttggcattattttagggggggcagcagaggctcagagacgtcaactaacttcccccaggtcacagagcaaagagccaagccagagttttccagccccaaagctgatgctttccccactgcaactgttttctctcacctggttgctgcctgcataggtgagtgatgtcacatgggtggtacagactgcccaagccaagtgtggccaacacggcagcagatgggataggccatcatctgcatccatgttttgtgaaacgtgttcagtccacactcttaatttctacttattttttggccatactccatgtagcatgtgggatcttatttccctgatgaaggatcaaaccctatgccccatgtaacagaagtcttaaccactggatcaccaggaaaatcctttaatttttactttttaatcattgtaatgtgatacttagataagagtaagtgagaacaagtcaaaaatgtggtccctgcaaatgataaagctttcctaagctctcatcacccagcttccatgagatggcccctttaggtggcctggccgtcccatgcccagcaccctgggatctgggttcagccccagtctgccttgcaactttgtctccactggtcctctgggg

SEQ ID NO: 46 - DNA, 75831 bp, Bos taurus
  unsure (332)..(383): sequence unknown
  misc_feature (333)..(382): n is a, c, g, or t
  unsure (55059)..(55110): sequence unknown
  misc_feature (55060)..(55109): n is a, c, g, or t
  unsure (60703)..(60754): sequence unknown
  misc_feature (60704)..(60753): n is a, c, g, or t
cctgtgggctggcctagcagtatcctcagccagaaggacatcctcagcacccactcccatgctagttcatgggctgggtccctgctctcatcccagcatttgaaatggtcagtaatcctgtcaccagctcctgggcccagggttaaatcagaaaaacttttgcatatgacttgtcttttaatctccttttgtttttttaaccagcatctcacttcctcattataccctctgtccgctcacagcccctcacccaccctacccggctcctctgtacatcgtgcacggcggccgtggctgcacccctgacctgagcacgcgggcagagtgatgtcnnnnnnnnnnnnnnnnnnnnnnnnnnnnnnnnnnnnnnnnnnnnnnnnnntccctcctccccctcccccctgcccaccttcccctccctcccctggcccccttgcccgccctccccctcctttctgtcctccttgcctctgctccccctccccttctccttcctcaccctcttcctcaccctcttctccagtcttcccaaatacaaagagacaaaggctaagttcacggaacgatggcacccacgcccctccttcttacagcacgcgcctggagccagagcacttgagcattgctgactgtcacgcaggtagagcacccggcacccggtgggtgctcagtgaatgtatggtggttacattaatacacgagtattatagtcaacatcgattgagcatccacctgtcaggcatactctagacacgtgccgtggttatcttggcaaaccctcacaatgacgcagtgaggtacatacttttatatgctccacacccacactcacacctccacactctggacatgggcttggtgctcaggtcttttagagctaggggctttcaagagacccaaagccaggcagacctgacagccccctatcacctctcaatcccaccccacgtcccagcaccacaccccagcctcagtcccccagtagcaagagtagagccatattagggccagtttctgtgaacacaaggcagagtggaaggtgagtccaagtcagcatgtctggccgggccctgtcgggcctcagcatccaagaaggaggccagagcagctcttgggggtagataagcaaccagagatattcttctgcagtgagcaaacctttggccagatcccctaaaatcagggtcaagagagtgtgaaaaagcgaggtgtgtgttcctgtgtcttgtttctttctgtttatctgatttgggaatgtatgtgcagtcttaaaaacaagttagatcatatttccttttaggtgaaatgaatcagctttattgaacagaatacactgaactcagagctgtggcctccaaaatgagaatgtggggttactgagttgatcaagaaagcacgtcaagccatttacagatgtcttattaagtcctcataactgtggtagaaactggtgtcactcctttttaaactgaagacatttattaaagctcaaacaggttatggaagttgtctgaggtcaggcaaaaaccactccatgtggctccatgccactccagtgcctggggggctggacaggggagctgcacccaagcccagagccctgcctgggtgggaggcagggtgtgttcactagcaccgcaccaggggtccactgggcaagttcagcttcattttcccagtgaggccgaaaatgatgaccagatgaccttgtttgagaatgcctgaaatcagtgcagtcgttctagaaataattcctgccagcaccagccctattctaagtcctactctaggtactagaggttcttcaatgcatgaaatatagttcctgtcctcaggaagcctgcattctagaggggagccgggtagtgaacaaatgtggaatagggcaagggccttgagtatgaaataaagcatccatgacaggtagggaagtgtggggagtggcctctctgtttaggtgatgtgagccgcgaacatgaggcagggggtcaggaagccacgtggagcctggggaagggctctctctgcaggtggaacagcgggtgcagagcccctgaggacaagagttgggaagtcagagacagctgcggctgtgaaggtcaagggatgggtttagccgcctgctggagcgactgccctgactctgtacgcagaggatggccggtagggggcgcggctggaggcagtgatgcaggctgagcacgtgttggactggggggggcggagggaggtgaagaaacgtgctgttaggttttgctgacacatcagggcgggggcaggtggagggtgaacgcatgagaataaaagatccaaggatggtttccgaggtttatggcctaggaaactggaaggatggagttgccatttcccgtgatgatgaagattcagggaggagcttgtctgttagacgcgaagtggttgggaggtggccaggccggcgccgcagccccgcccctgagggtgaggaggttgagcaccagcgccaccgtgtggccagacctccccagcgccccggcgcgcttcgttccacccgtcccttggctccagagaggcgggactttgtggagattgacagtgaggggtattaggaattattgatcggcaggggcctcccgtagagctctgcaagagcccagatgtggggggcctggcgaaccttgtgctgggcacgggaatcttggattccgtcactcctgagttgggtgcctagggcagggcaccagccctctgtccctcagcgtcttcatctgttacagactttaggatctttcctgccgaatatcaggagccgctgatcctgactccctgactggtagcactacccctctgaccttcaactgcagcatgagatgctggccgtgctgcctgtgtgttgaggttgtggggtacttggggtgagaagagctgaggtttattgggtacttactaggtgtcagaccctcacaatcctctcagcagcttcatgaggtggcttttattattcttacccccacccccaccattttacagacaaggaaactgaacccagagagaaaaagtaaattattcgacattgcacagtaaggaaggggtgggactgagattcaaacccagaccatttcctgcttctcagtgcataaaaacatttttaaactggcagtgtaatgatgtaggggttataaaccttagtcctgactcagccattactttctgggtgaccttggggaaacatttgcctgctctgggcatgggtttccccacaggttgatgagaggtgaggctaggtgaactcctggagctaaagtcttagggcaaagctttagggtatgttttgcctccccctcacgacccctgctctgtggtccccagccccttccgcctctctggtcattctgctcccagctgccaggaggtcatgcccttggcctcccttcacctgacagctccaccccgcagttttttatctacatcctcttgcatgcccgactgtcatccatttgctgagtgctgagctgtttgaaagcacaaatgctgggctttctggtcccggtgcagcttggcatagtggggtccagagaagcatggttgtaccagtgacctgagtcagctcatgtgtccagctctcttagttagtagttgagtggatgctgacatgagcgtagtgttgggccagcaggacccaaaccctcaggatcctgccaggtgggcgagatgttagcggagctctccccagagtcctgattgctgccaacttcagagatgcccaaactaggtctgtgtcctgttagagctgaccccgctggtggggctgccccagcagaagtcagaccaggaggctggtatttcagagctctactctcctccccagctgggagcaccaggggttctacaagcaccttctctggacatgagtggctgggaagaggccctctccgcaggctgaggtcagcttagccaaaccttccaagggaacagggcctgccacctgccagatgctattgtgccaggcatcagcagcgtggccacagtggcaggtgtgtatgtgaactgaccgtgcccagtgctgctggccccgccagcatggctgctgtattccagaataatagatgtctccatgaatgcgctgagtggctacagttattaatatttgagcccttgatatgtgccaggcttgtgtttcctcctcctagcaaaccttatgagatgagactgtcatattcatttgacaaagatggagacagaggcccagcagagtgacttaacttgctcttggtgaagccaggactgaatactaaccaaaaagaaaaagaaagggaaggcctgtcttgtttgctgtggtttgatgccagccttactacttactttgcctgggcaaggtaaggtgaactgtctcatcttagttccctgtctgtaacatgaagataggaatagtgcctaccgggcaggattatttgtggattaggtgaattaacgcacatgcaggccctagagctgaaccttaacatggtagatacgaagtcatttttgctgtttacaaagtgctcccataccctcaacgatcttggccgtcaggcggggtttgtggcacagagcagcgtggggtgcggctgtaacctcgggcctcctgtgtctgtccctcaggaaccagtgatgacccattccaggactcggaagggcgagagggcgcagaggccgtggcagagcaccagttttcagacctggacgactcggactcggactcggacctggacgaagacgaggatgaggacgaggaggagagccaggacgagccatcaggcccgtcctcggaggcgcccccacctggcccgccagccacgctgcccgcagactcctcacccgttcagggccctcagcccacagaggccacccggggcagctcggtctcagaagccgagcgctcggcacccagcagctgctccacatccagccaaagcatcctgtgcctcccccggctggcaccggccccccggggcccagtggagaaggacacaggctcggccctgagctcccaggccctgtccccaaggaggccgtggtccccaagcaaagaagcaggcagccacctaccactcaccccaaaacactcactaaccaaaagctactcgtctccccagcgacattcaccggcccgagagccactggcctcagccccgagtccgcctggctcccagacgggccctctcccctgcgggtccccgagactcgagctgtcgcctcttgccctccaccccctgggaagggaactgccacttcgagcgcgcctgccccccgaacgcaagggcgctgcagacccaggcccccccagacactcgcccaccaggagatggtctccaggccaggccgagtcaccaccacggtcagcgctgccagggaagtgggccttggcagggccgggcagccccttggcggccgagcgtggcccaggctcagggctggccccccgggctctctacccgcccgcgcctctacctcacaagcttctcggcagaagcccagcggagacctgcacctccacatgggtgagttcctgtcccccaagtggctgatgggtggggggccgcgagctcacacctccctgagcgtcacacccagagctggacccctgccagttcagcggttaccaataaggcgtgcattgggcaccacttacacaggcactgtgctgggtgcctgaaaccagtcagctgtgtgtcagaagcagcggagcatggactgtggagctggactaaaagaaagtgaaagtggaagtgttagttgcacagtcatgtccaactctatggactgtagccggccagactcctctgtccatggaattcttcaggcaaaaatactgaaatgggttgccatgcccttctccagaggatcttcccatccctgggatcgaatccaggtcttcagcatcacaggcagattctttaccatctgagccaccagggactacctgatagtttttaaattctggactacccagaattaaatccgggttctgtcacttacgagccgtgtggctttagatgtggtataaacactcatgccatctcctcccaccccatttccacgtattctttgagcagatggcagagcccaacccaaatctccacatctccaacatgactgccaccagcaccctccgagtcacttgagccagctccttcccatcttcccatcagcaccgtcactgtcacatcatcagtgccatctgccatcagtacactccagccaccccataggcttgatcaccgtggtcacaacatcactgccaccaccacggtcacgatccccagcactgacacgttatcatcatcggcttacttttcctctcccaacaccttttctgtcactggagtgtcacgacccaacatctctgctcaccgccagcagtgtcagcaccatcactcaagcgattcaagctccaggagtagtaccatccaggaatcttaacttggtttttaatttggggctcaagttaaaattcctggtggtgaaaaagtgaaagtcgctcagttgtatccgactctttgtgactccatggactgtgtagaattctccaggccagaatactggagtgggtagcctttcccttcaggggatcttcccgacccagggatcgaacccaggtctcccgcattgcaggcggattcttggtggtgggaggaggttaagagcctggggtgggaactcatgttcaagggtaaagttgggtcagtattgtctgaggaacaagagaggcagcagaagcaagagagagggccagcgcacagaagccaacagaaggggcagctccattctctgaaaacgaacgcgctggccagaagcgtggggaccttggttcctgagtgtgcctatggccactatagggctggagatggcccattccagagagggcacccacccagggtgccaccgttggcaagggttgggactcaatggtggcccagctcagctaggacctgctctgtgatctcgccaagccccctcctcactctagtcctcagggtctccaggtgcccagcaggtaaccctcgccttcctctgtcttcttttctgaccctagcagaaggccgagtcgccaagtccgtcctgttcacctgctcccgctcatcctctcttctcccgacccttctcggccccccatgacttccacggccacagcccggcccggacggagaacatcttcagccacctgcctctgcactcccagcgcttgacccgcgccccgtgccccctgattcccatcggcggaatccagatggtgcaggcccggccgggggcccaccctatcctgctccccgggcccagcgcggcctgggtcagcggtttctcggggggcggaagcgacctgacagggtcccgggaggcccaggagcgaggccgctggagccccaccgagagctcgtcagcctccgtgtcccccgtggccaaggtctccaaattcacactctcctcggagctggaggccagggactaccccacggagagggggaggacgagagggggcctgggcagacctcccgactgggagccccgtgcggcccaagtgcccacagagcccacgccgacgcacagcccccgcacccccccagagacctcaccccgggcacccccaggccaccgggcagagtcccggagcccccacctggagtcaccgcgggtgccggccaaccctgcggcctccgccaccccgccgctggaccgcagcagttccgtgggctgcctggccgagaccgctgctcgcttcccagcccggaggaggaacctctctggggaacccaggaccagtcagggctccccccagccctcgggaagtggggggtccgggacacctccacaccagcccgaggagcgggggccccggagcacttagcctctccctgaccacttcagcatctggtttctggtgtttggcaacagacgtttccagccgacttcctcgagtcatcttgctgtcacgggctccctgtcccatctgttgatctttccaagcagcttctgctcagcccccatctgtcttatcttcccacctcgtatgcagttacctgtgcctttttctatgaccttttgttgcttgaaaagaaacaacacacacacagacataaaaaaaaaaaatcccacgaggagactgaggctgtgaatatttagatgggacctcaccctgggccactgcgatcagcagccccccacaaagctggcaagaggcagtcagttgctgaaagaaaggggatgcactgagggagagacagagaaaaaaaaagaaacttttaaaaatatataagtaaatgtaaaagcaagcactcctatgtacagagtttatggttcctatttattgctgcttcatcccaccccagctagtggcctcccctggctgctagcagaagggtcagcggcccaaggcagagggacaggctgggagactccatgggcaggcccagaaaactccaactttccttttccaaagataaggtaaattttcctaggatttcaacacaaactgtttggagcaggtagaaggtagttgctggttgggtccccagggctcgcagacaccctggtggtctgactcgtgaccccattctggcatttgactcatagacaaatccccccaccccggcacctctactctgcactctgccctcaacctttggactggggaaggagccctgaccacccatctcccggttcctgagcacctgacctcggccttgctctcagggccccagccattgctgcgcctttgttctagtaactacccacaaggctgaagggacaaggcctaacccctgggggtcaagatccaaggtgcattgccttgccattcccaaggccaggcttgggcttcatttcacatttggtccctggggtacaaagggctctatttcctccatgactgggcttttccggtacttagcactggaagtttccaaggactcatttctggacctctttgcagcaggaccagtcctcctattggcgtgtcacacactgtcaggcctctactatccccaggaagtacccagaaccatgactggtgggaactgcccaggcctcctattggttggcttaaatctcttttaaaaaataaaattatatatgtgtatatatacatatatatacatacatatatatatatatatatatatatatatatatatatatatatatatatatagaaagagaatggtgtttgatatttcccctagcctcctattgtccgaggtcatttcaattcttctccaaagcaatcaagaataactagtgcctcatttctcatccccatctcctcctttaagaagctgccctgtgttttctggggcaaaagcctgctttgtaaaaaataataataaatagtaataacatgactagaaattaaaatcccaagttgaaatatagaacttgaactctagcatgtttacccagccctgggatatgtggggttttccccaacctccagaaattcttttcttttgtctctaccagggggagaaagcacaaggaccgtggtcacagcccagccaggctaggtgctaatgccgcagagcagggacctccttggccggtcctcattcctcagccaggctgtatgaatcctgtggccagagggggctcctgggctgttgaagttgcttagacaggacaccataaggtgcagagggctacaccatgcagaggcacctctgtgggctcctacccttgggcgtaattccctcttccaccagttcaggacttttccttccttggactctgctgccaggacaaactagccaggccacctggttcatttccctctggctaagacaaaaaggggacaatagggatgggcttccctgggagggggtggctgggccccagggtgctgaggctagggttaaccagcacttcctggctgcctgacccagggtctgaagctcttggtccccctggaagaaggctaacaagcccagccttggctatgctggcacttgtgggtcctggcagaaagctggaaggagccccggaccccagtcacagccttggccagaggctgggtttttcctcacccttgctttccaaccttaccccagggcaaaggtgagggacatgggaaggtggctgcctaaggactggagacttcaagggccgaggcctgggagctgaataaagggcattgcttcagcccaggcttgaaatcttcctgggcaagatcttccagctcccaacctacagagcagcaaacagggggctctgctagagtagcccctgaccttgggggtagccaggcccctcctccaagccctgccccacagctctccccggggcatcattcctctggtactcagacagcccaactactaaggtttccttcctggagccctagtcatggctggtggtggtcagcaggggagagtcaggcacaggcagaggggatgggggccaggagtcaccagagacccatttctcaatgacagacacaatgtgcaagcaatctggccaaaaggttgttgccctgcacaggcatccagagaaatggacttgatgccacccgcctgggctgtatgtcactgggcatggctctcaccctctctgcctcactcaactcctgctcccccaaacacagagctcccagcccgcacgcacacctgcatgataagggaaagactctcacatcacaccctcctcctgccctgctcccagccactttcacatttccagcctgcctgtgacactgttgtccctgttaagggacacagtggagaaagcagtgcccattgttggcacagacacctgtgcctgttctgctgaaatgtgcaggacagtcattcctgggtacaggctggctctggtcctcgggtgttggcagccttgcgggctggagaccaacttgctggggtttcagagccagctcttgtcatggggattccaagccagccggcccccagttctaccctccaggatgcccttcaccctcaggacaagctcagggtcattctgggcactaacctgttcctctccaaggcaccttttacaagcctacttcccctgccccaccacccaccaaggccccgactactaagaccctccaggaagtcaacagcagcgaactgcccactctcccacctccatcacctccaacttccagacccagcagtcccttcacctctctctgtgttaacaagtctgaaagatttaatttctgggtccaggtagcccctgctccatcctcacccaacccttttgaataagaataatcaagataactaagctgaattgctttctagtcctttctccagacaaaacctcttcaaaataaaagtcctgcctggacagtcgtccttggagacagatctgcagcactgaccaaggggagaaagttcccaaagacctgttccaccaattctgctcctgagtcgtgaatcctgtctgctttccatcagaaaactgcttcggcacttatgatcactttactaagcctagtgttaaaaaaggaagagaaaagaaacagaaaaaagaaatgtataggcaaatgtaagataacacgctctctgtaagatagaaatttgccttttttttttttttccctaaaaggtgtatgtattctgtatgtgaaattgtctgtagagagtttctatgttcttaaatggcaatacattccaaaaatcgtactgtagatatgtacagcaaccacactgggatggggtagttttgcctgtaactttatttaaactccagtttctctacttgcatcttgcaatgtcggtatggtatatatatcagtgcaaaaggaaaaaacaaaaactcccacaggtctaaagcacagagtctgatgtacaaaaagaaaatactgctcagtattgatgtgtgacctttgttgtaaattacatctgtactgtgaatgagaagtttttacaagtataataattgcctttattatagctctggctgagtgttcagcctgaggatattttttaaaaaaaaaacagcacgttggaataaatttgaaaatcccaacagaggcctgcttgcccggctcatgatttttcttagggctgtagaatgtcagagctggaaggacactccgagtcccaagtgctttttctgctacagagaaatcagggccagggaaggcgagtggccaggccatagtcacatagcctgggattccaagggcccggcccttccaggcttggcaggaggcacgggtacatggccatgtggtttggggtctgtattcatttcctagggctgctggatcaaatgaacaaactaaatggcttaaaacagcagaaatgtgttctctcacatttctggaggccagaggtctgaaaccaaggttcctggggaggctctgagggaggatctgggccagacctctgtcctcacttctgggggctgcaggccatccttggcctttggtttgtcatcacagcactctcgtctctgcctctgccttcgttctcgctgccttctctgtgtgctgtctaagggtcctcatcactggacttggggaacacgctcattcaatatgatctcatctctagatctttaactgaagtatatctgcgaacactccttttctgaaggaggtcacacttacatgttccagggtttaggacatggacttacctttgaggggccaccactgagcccctcaaggtaagacctggaatctgatcgtgacagttattcactgcctgtgtgacactgcgcaagttacacaacctctctgggcttctgtttcctgttctgtgaagtggagggtttcctgtgaggattaaatgagagagtatatgtgctaagtgctaaatcacttcagtcgtttccgacttggcgacactgtggactgtatagctcaccaggctccaccatccatggggatcccccaggcaagaatactggagtgggttgctatgccgtcctccaggggatctttctgacccagggatcaaacctgcggctcttatgtctctggcattggcaggcaggttctttaccactagcaccacctgggaagcatgcatacagcatggttaacagaaccttgaatatggtacggcgtcaacaagtgtcctctgagcagacctcacacagggtgctgtggttacaaggatgaaaaagtcaggtataggtccccaccttttgtatgcaacaatgacttgctctgcaccaggcagggactaatcatcagatacaacagtgagcaaatcagacagccctgccttcagagaactttcattctaatgggagaggccgtccttaagcaaataacgacatcatcaattcctcagtcccagtggccgtagttgttgctacaggagagaacaaagctctcacacagagtaagtcctaaaactcctgtgggctctggagcctgggtgggttgtggggagggctgcaggtggaggtggagtggaggggaagccatgataggagcagacagaagaagaggtacgtggacaaatcaagagaggccttcggggtaaaatgctggacacaagtttagcactaagaacctaagagggcctgcttgtttcagcggcaggaggatcattgctgacttggggaaaagccggcctgttccagcgcccagtctgcaggcccttcgtaaacactgccagtgctgaatggattgtggaggcagggggtggaggctggagagtgaggagaagagggaagtggggacggcagacccagacatcctccccaggacctgaggggagggcaggggagagctgggcagcagctggagggcagcaaggcgtccagggaagaacggagatgggaatgaggtggtgagaccccagcctgcttcattaggaggagatgtaagtaccagatgcagaaatttcccccagtgtgacccaagggaagaggtgcaagtgataacagtgaccggaagttgagaacatttccgccacggaattttctctgtcacctgctgagaagggaagaggaagctccagtatggggtagggggtgcggagcgggggtggtgtggactaaagacttgagaaagaaaaggttggaaattgtctttgttcattattccagaggcaggacagttgtggatgaaggcagtgtggaccacacaggcgtgggtgctgggcacaagagatgaaaaggctgggaagcgagtatccatggtgccagtgacctgaatgttcatctctgctgaccacagggctggactggaaacccaggctgtgagctaggcttcataatccaggatatgggctgtcacgctgcagaaacaagcaagccagaaactccagaactgaaaacaatgaaagttgaactttcccctctgccatctgtcccatgtgggtcagcagctgaagtgtactcatcctcatcatttggagacctaggctgctggacgctttatcccgtgttcctgtgacctcagaggcagaagaaaggagagagctgtgaaatgttgcattgacagctaaatgctctacatgggaaaagacatctctcctttcaaatttcacctgccaaagcagatcatattgctgtgcctagtgacagagatgaggaatatgtgtgacagtcacacaaggatacgacttcccagtgtcagaaacacccaagggctgagcagatgtcaatgatgggatgggggcagggacagggcctcatggcatcggcctcaaaggtgctgggtttttacagggagtgaaaaaaataatggtgtgcaaggaggcctggaagaaaatggcccctggcattttgatcatggggtgtggaaggcaaggagcagctgtctgggagcgagtccttggggagatcctgaatttcagtcgagaccagtgggaaagtggaatcccaaaaaggcccaggagaagaagagcacagaatggagccaagtccggcctccagcattttacaagccctatttatagtccttgggcttccttggtggctcagtgaaggaagccacctgccaaggcaggagagataggttcaattcctgggtcgggaagaacacttggaataggaaatggcaacccactccagtattcttgcctaggaaatcccatggccagaggagcctggagggctacagtccatggggtctcgaaagagtcagacatgactgactaaaaacaacaatgtatagttcccaacgacaacccagggagatgagacttacggtccccatttttagagaagaaagtggaagttccaaagagcccccaccaaggacttcctgctaagactctgtgctcccaatgcaaggggtttcagatttgacccctgttcagggaactagatctcacacgccccagctgagagtctccacgccacaacgaaagattccacatgtcataactaaagatccgacaagctgcaaagaagatccaggatcctgagcagatcctggaaagatccactttccaagttacaacaaagactcggtgcagccaaatgaatacaaataaagaaagaaagaaatattaaaaacaaaaggacccccaccagccaaagatgcagggctggttagaggctgtgtgagactgactctagcctgactctggtgcagcgcctctgggagccccaagttcctccctctcatctcctccctgtgctctggccccaggggagccctggatctcagactcttcacctccttctccccaggaacccaggggaagaggcaggcccaggccaaggcttcttcccagcagctgcctggcttctcgcagccatccaggatagccccgtgtgtccccgtgtctgaggctgaaggcgcagggatggaccatcagactcaggggctgggattccagtgctcgagagcatgccaagtgcatgcaaactctctgaagaacctgactccccagcctgctgctggcacccaggcccacctgtcactcacaccaagcctcccatggcctctcgtattcacgaggcaatttcccttttggagtgagggagatagggcacctacttccacttcacagaagaatagatcccaagattgcaccctggcaagtggcagggccaccgacccgggtcacacctgacccagaacctcaggaaggcttgggctgagccttgccactgcccatcagggctgggccttctccctaggcctagaccctctctgggcttaagacctagagaccatgcttactcctagagattcccagggacaaaccacggctggcaggatggcctcagaaggcaggccagcctgagatgggcatgagcagggagaaacaggaagcaaaaagagtcaaataaggatgggggcgactgaggagggagcagcccagggctgccctgcgtgggactcatcactgccatctggcccggggagagacttatcacctcgtcactttgtagaggaggaaggctggggcttggacaggtgatgctgctcataaggccacagtggtcaggggcagagcagagacttaaaaccaggcccacacattcagggagtggttgggactatggaaagggaatctgggcctcttggctacctcttagtcctgaaatctgggttgggggaccccagcagacatatcctttaattccatccagcctcagccactttacagagacccagctaccaacctcccccttttataaatgagaaagttgatgtccagagccgggaagagcttggcccaaggccagagctaggattcccgaaccctcagcagagccacctggaccactccgcccacccctccttaccccaggcccaggttcacctgcccagatctgcctttttaggaaaggaaaggagcagccctggtgggggcaggcgggtgggcaggcagccacgctaatccactagctcccggaggctctggttaccgtggtttggggcccgggcaaccctggctgggagtgccagcccagccaatcggtgctgccgctgagctactctgccagagccatacaaggctttgctgcagccctatcttgagccaccacaggacagccccagcgtcggcagccgccccgcccgggagcctgccagcccggcacgtcctcggactctgcctaatccaacctggaagcaggcagggctgcagcgcacgtgcaccgggcccagggttccccaaggccaggaaggtggcactgccagggcagaggccagaatcggggcaaagacctagccgggcatcggagatcctggctggggtcagggatgagctcaggtctggtccaggctgagctgtatctctctgtaagatgctcttctgttcccatcacccctttggcctgactgactgcttatccttccccattcaccgtggagacggggctcagcacagtgagtatctggtcccttctgaggtcttctcagggtccaagtcccaactactctaacccatccagggtctgaggctgcatgcacctctcagaattggggcgtccatttctaagtgcacgttgtgagcatcaggcacatacagccccccctgtggtctttgggggtccactgtcactgccatggatctgggccttggctgtggaagcaggtggggaccggtgacccctgcccagtggagcccatcccatctgtcagtgcataacacctgagtgttatgaattcacaggacccccgaggagtggaaactattggccctgtttggcaagcaaggaaatcaagtcacagagaagttatttgtctgaaactggagtgtcaggattcagccccagagtggtctgactctagatctctagaaatttccgatcctggagggaccaggggctgccatttacactgaagtgtgaatggaggcgagaaagtcattgtctgagataagaggaccctttctttaaaatatgtatctttttattctttcgttgtttttggctgtgttgggtctccgttgctgtgcacaggattcctctggttgtgacgactggggctactcttggttgtggtgcatgggcttctaacagcggcggcttctcttgcggagcacaggctctagagcgcacgagtctcagtagctgtggtgcacgggcccagttgccctgcagcatatagaatcttcctggaccagggattgaacccgtgccccctgcactggcaggcagattgccaaccgctggactatcagggaagtccaagggtgccctttgttcctgaattgggtagggccaggcccccagtgcacggccattgcccaggccctggtcaggttgcccacgcatgcagcggcccctgcagagcgtcccaggccaccactgtcaattagatttgtcacggaagttcactgggttccaacatccttgtgtgtcctacgtgggccaagttgagctcaaagccaagactgcggtactccccagggccacccggcaggtgagagaaacgtgccgacctggggggtggcaggccaggctggcattaggctctgtttgctcacccaagaaaggaagagataaatatagacacaggattactcagacacagcctgggaaaaccggctccgaacctcgacttcagccctggcccggtctcaccttcacccgcctgccccctcggtgtctgctgccaggcctgccccacctgttcccaggacgccccacctgcaaacttcaggacagccgttcctgcctgccttctgggggcaggacagaaactgaggcccagagagagcagggcacccgcctcacatcccacagcaggttaggagctggtgacgcgagggctgcactgcgggagtcagtttatcaggtccaggcaatgcaccagcccagattcggtttccatatttgtgagatggggacctggtacccccggccctcaacgccctggagcctgcgtgtagggtagagttggagaccacgcagcagaaaggggatgaagctggaggctcaagcacaggaaatgctggcccaagccgcatgtgtagggcttcagcactgggactctggagccaaatggcctgggcttaatatccccctccaccattttcagccaagagatttggggcaagtttcttaacatggtgccacaatttcctcatctctaatataagaataataagaattgttattctatacaataaataatatgtacagtattatttgggcttccctgggcggctcaatggtaaagaatccacctgccaatacaggagacatgggttcgattcccgagtcaggaagattacctggagaaggaaatggcaacccacgccagtattcatgtgcttagtcactcagttgtgtctgactctttgcaacccttttgactgtagtccaccaggctcctctgtccatggaaatcgggggcaagcatactggagtgggttgccatttcctcctccaggggatcttcctgacccagggattgtatcacatctcttgtgtttcctgcattggcaggtgggttctttagcactactgagcaaccagggaagcccaaataatactgtctataatactaaaatcccatggacagaggagcctagtggactatagtcgatggagtcgcaaagaattgaacacaagtatgatgttatatatatgtacatgtatatgtgtacgtatatacacgtacatatatgcacatacacataggtattgatacatatatacatgtagacatgtgtgtctacccacatttgggtctcgcaggaggtgctagtggtaaagaatcctcctgtcaatgcaggagacataagagatgcgggttcaggtccctgggtggggaagatcctctggaggaggggatgccaacccactccagtattcttgctggagaatcccatggacaaaggagcctggtgggctatagtccatagggtcataaggagtcaggcatgactgaagtgacttaccatgcatataggcaccggtattcttgggtgggaaatcccatggacagtggagcctggcgagctacagtctatagggtcacaaagagttggaaatgacttagtgactgagcacgcaggcacatatatgtagatgtattatttacatatcattacaataataatagcctaataacaataccaacctctcagagtgttggggtggattaggtgagattagtacaaagcacttacccagggcctgacacagagcaatgactccacatgcatgtttatgatgatgcagccactggggcaggtgggggcctgggcgcaagaggcgtgggtgggcgtctccaagtctcctgccctccaagggaagagctcagccctgagctctatggtgcgttggtctctcctgcactgtgacccttgcagcagctccctgctctgcctgaaagcttcaagagtcaggcagacatggatttgaaggttggctcccacttacgggcttcccttgtggctcagctagtaaagaatttgcctgcaacgtgggagacatgggttcgatccctgggttgggaagaccccctggagaaggaaaaggctacccactccaggattctggcctggggaatttcatagactgtaagagtcggacaaaactgagtgactttcactttgccaccacttacagactgtgtgaccttgggcaagtaactggccctctccaagcctcaaaatccacttttatccctcttgggattggtgtgagggttaaatgggggaacaagtgcgaaactctcagttcagccaggcaagtggactctctatgcttgagctcatcctgagccccatctcttgtttcctccagtttctctcagtggctatgagctgagcccaggacaggtgcatgaccctctgggtgcatgaccctcacacatgcaagggttctcagttatgggaaacactcaccagcccctacatcatgcatgagctcatgttcctgcccttgggtccctggagccatcagagatccgcaagttccccctgtactcttcatgcactcgtgcatatccacacaggctccctctccacattcctgcacacgcacatgcgtgcatctatggacacacagggcacagctgtgtgcgagctcggagaggctggtgcccacaggtgtgtccctgcacacctcaccagcacgcacgctgccacagtcaggggtgttctagccaggcctgccctagccaggcctgcccctgaggtggccgtcttcacagcagaggaatgcagacagctggggatgctctgccagcggacgtgagggagaggcccaggggaaaccacacgggcaggaatccaggcaggcgttccaggccaaggtggagtcctaaggtgtcaggaagtgcggggggggggggcatgtgcagactctaacttgctccagtctcctctctcatcaccctgtgtcctcagcctctaggacttggaggccaaagggttgcacagaccaccgttctccatccaagacagccagccagctctacctgcacagccttgctgcctagcagagcactgggtctctgggctgcagtggcctggtctcagctagaagggatcattcttggcatagggtctttcttcctcactggggaagaatctatgatcacagaagaatctatggggagaatctatggggagaatctatgacccagaagaatctatgactgcagagatcagcagaagaggagtgggttttttttttcctcatttttattaacatatagttggtttacaatgttgtattagttttcctgtatagcaaagtgaatcagcaatatgtatacatatatcccccctttttcggatttccttcccatttaggtcaccacagcacactgagtagagctccctactccctactactaataagtagattctcattcagttcagttcagttcagtcactcagtcatgtctgactctttgcgaccccatggactgcagcatgctaggcctccctgtccatcaccaactcctggagttcactcaaactcatgttcattgagtcagtgataccatccaaccatctaatcctctgtcatccccttctcctcctgccttcaatctttcccaacatcagggtcttttccaacgagtcatttcttcgcatcaggtggccaaagtattggagtctcagcttcaacatcagtccctccaatgaacactcaggactgatctcctttaggatggactggattggatctccttgtagtccaagggactctcaagagtcttctccaacaccacagttcaaaagcatcaattctttggcgctcagccttcttcacagtccaactctcacatccatacctgactactggaaaaaccatagcgttgactagacagacctttgttagcaaagcaatggctctgcttttcaatatgctatctaggttggtcataactttccttccaagaagtaagcatcttttaatttcatggctgccagtcaccatctgcagtgattttggagcccagaagaataaagtctgacagtgtttccactgtttccccatctatttgccatgaactgatgggactggatgccatgatcttagttttctgaatgttgagctttaagccaactttttccactttcctctttcactttcatcgagaggctctttagttcttcttcactttctgccataagggtggcgtcatctgcatatctgatttctcccagcaatcttgattccagcttgtgcttcttccagcccagtgtttctcatgatgtactctgcattagttatctattttatacatagtatcaatagtgtatatacatcaatcccaatctcccaattcatcccccactctttccccttttggtgtccatacatttgttctctacatctgtgtctctatttccgttttatagatgagatcacctacaccattattttcagattccacacatatatgttaatatgcaatatttgtttttctgacttcactctgtatgacagcctctaggcccatactgtcatcattggctcaagtcagagatgacggagacaatgtggaagtcactagaactcttcaggcaggactcatactgactcagcagccagtgtatgttaggtaaggcacttgcatctagcaactccctgagtgcttacaaaagggcctctgctcccatgtacagatggggaatctgaggggcagaggcggcgtcacctacccagatcccctagctggctgactccagacaccagtacgtaaccactgggccatgcggcctctgtcaaagggcacatctcacaccctggaggagaggtttgcaaatgaggctgaaacactgctggcacatgaaagccactgtcccacatgcaggggcagcccagcccaggtggcagagagggctctcccaggtcacagctacatagagatggcagggggaggctgagagccatccaggcttttggcgtcttctggcagcacacatccctggggaccagctgaagctggggaacatgtcagtgttccaagaaatggcaggcacgaaggtgggacatggcctctgcaagttcagccctggggtggagagaggtcattctccatcttcatacagaaaacatggcctaagagggacagagaccaaaaagttccagaagagactgagcagggagaggggctgccagcggagacctgcctccacttcctgaatctctgaggccagggtgacaagtggtggcctcctgtgaaaggcccccgagccaactaggtccctcaccctccagctctagctatttgctgggtggaactgctggggaggagcatgctaggccctggtgctcaggacctcatggatgagggaaggaagaagggagtcagtgcttgaaaaaagtccatctggggaccttccctatactccactggccacactgcctgccccctgcaggttctgtttacagacctggccatttatttacttgctggggagcaaaaatgggaaaatgacagtgctgtcatgggaggacccggaggcaaatgacatgcccaaggccacacagggcagaggattctgacttgtcacaactgctgcttccaggaacacccagatgcgtagccccaaggcgtcacgctacactcaccggggctgccctggggagccgagcctgccctccaactctctggaagaacagggacccaggcacactgcccccggggcagatgactgcacttctctgcgcctctggttcttcaaacagcaatgccttccactcaaggctgttctcatcatccgacggcatcgaacttagatcaaagcatgacctggcacaaaaagcctctcaggcgcctcccctccgcccgaagtttccaaagacttctctaggcctctgcactccttcccaaggcacagctggacttgagacctcgttgtccagcacgagactcaggggaggaaaacaaaccaagaagccagcgtcaccccacttgtcagctggacagacccgcggtccagagaggggcagtgacttgggggaggcacacaagcaggcaggacttctcccataccagcttcatggagagaacaggccttggaccccacgtagtgtccccaggggaccctgggggtctcgctgtggctaagcggcctctcatcccacccaccggccctgcccccaggggttgccgtcctgtgacccacacagggcgctcgggctgccagggccttttagagtcagagccgctgagacttgggaagggggctggcctccctgaggtctcctggggtccccagcagggcagctaagacctgagtccccagcggcacgtggcggcgctgcccgatcggtgatgtcaggcccaccacacccgggccccagcacgttccttctcagagtcggcagagcagagaacaaagcgtcctgcgcattcttgcacgctgactcatcgcctgcacgtagagccacagcagctgctttgcccaaaattggtcgggaggcgggggcgcgccagacatggcagcctggggtcctctgctcactcacctgctccacactctccaggagcccccagtcccaggatttcccaaaacaggcaggaaagcaagaggcactggggggcatgctgttccccaggatagccagggctaccccctgggggagggctcgtgatcaggcacaggtggcaggctggggataaggcgtagatgcaggcactgcttgtctttgagcctcagtttcctcatctgcaaaatggggatgtgccagttaccattttaagcgtttgatatgagttcttttcccatattcttacaccaaccccaaatggaaatactgttatcatcatcatctcacaggtagggaaactaaggcacagacactgatttgcttgaggtcaggtgctagtgggcttccctggtggctcagtggtaaagaatctgcccacagtgtaggagaggcaggagacatgagttcagtttctgagtggggaggatcctctggaggagagcatggcaacccactccagtattcttgcctggagaatccatggacagagcgtctggtgggctacagtccatgggattgcaaagaattggacacgactgagcactcacccaggcacaagtgctagctagctgcagaggtaggatttaaatatgaattgtaaggttccagaatctgcatgtatcccctatatgctaaaatgcggattgaaatatctggtgcccagcaggtgttctcactgtgccctgacccttggtggttgagcctggtccctcacttcacctcactaaacctctaatccctcacctgtaaggtggggtaactgtgaaggatgccctcaagggattgtcagggaaattacactgaaggttcaagtgtgatctgtggaagaaaaggtagatttggttcaacaagccttcaaaccacctttggtcatctaggccaataccaaagtacagagaggagacgagctatgcctggggtcaccagccaggccaagccatactcgtctgggcctccccaggagtctggggaacacggagttgcctgtactctttgggaaagtgagggagcaggaggggccctgccatattccctctgccagcctggcctctcgcccccgacagcctgatttcagagaaggtggagttctttggatctgtcctgtgtcggggtcagaggcttgccctgagtttgtaggaatgaggtggccaccaggtggctttgttctcagctcttacccaggttgcggtgtcccccatctgaggcttgtctgatagtccagagaaagccctagaaggaattcagcacccctaccaccaccagcccccgagccaggcctggtctgggtcccagcgggtctgggccaccacggcacagatgcgcaggactccactctgtgcgctcagtcgctcagttgtgtctgactctgcaaccccatagactatacatagccaatcaggctcctctgtccatagaacttcccaggtaagaatactggagtgggatgccatttcctgctccagggtgtcttcccattccagagatcgaacccacggctcctgaatctcctgcatcaacaggaggattctctaccactgcgccacctgggaagactccactttaagctcaggaggaggtcagctcgggctgggtgtgcacggcctgtgcactggcctccaagctcctttcatccctgggtcctgcacactctttgctccagctcctagcacgtgccatgctcttccaggtctcccagcctttccccatcccatacctcttgcctggaatgccttctccaccttcagagcctcttttggatgcctcttctgctggaaagccatcctgacctttcaggaagaggcaggcactcattcctctggggtcctgtagctctttgtcctccctctttggccaacagaaagactgacacagaacacacactggcccttatcccatagacccccccccccgctgggtccatattccaagaaaaggccttcaagggccctccccccaaatcccaactgggacagagacccacagacccagcccaggtcttgcagagcaggctcagcctgtctactgcatgatggcaaaaggcacagcaaaggcgcctgaactcccatctcttctgctcctggctgtgtggccttgggcaacgcctgtagcttctctgaacttcttcattcccaggccttgccttgcccacttcccaggcccgtttggaagatcaaatgaatgaaggcagagagaatgcttggcgcgtgggcacagctccccacacagctgtcattatcaccgagtcattattacggacctgccttgtgcctggggggggcggtgcctccaaggctgggcagcaggcgggcaggcaggcgatgaactcagaagcagccgcagcctgggctgactcaggctgaggcactgggagaagtgggtgctttatggtcagcctgagccagcccagctctggccctctcctcctacccccaggcgtcacccaaatctgaggccacaaggccttccaggccctttcagggcctcttatctgggaagataaaggccccctccccttgaatggtggatctattcaaatggcttctgtgtgaccttggcaacagtcaccctctctggaccaggcttggggagttccggggtggggggcaggcagtgacctcaaaaggctcccagtgtgtcttccaggtgcttagtggggggactctcccactgctttgggccccagagggatggctcctgttctctccctccctgacactgacctgctgctgctgctaagtcgcttcagtcgtgtccgactctgtgcaaccccatagacggcagaccaccagactccgccatccctgggatcctccaggcaagaacactggagtgggttgccatttccttctccaatgcatgaaagtgaaaagtgaaagggaagtcgctcagtcgtatccaactcttcgcgaccccatggactgcagcccaccaggttcctccgtccatgggattttccaggcaagagtagtggagtggggtgccattgccttctccaggtgatggaactcccagtatcctccctagagtctggagttattatttttatctgacacataagaaaaatgaggcccagagatcaaaagaccctcacctaaggcagcacagtcaacagccaggacacaggcatgtgaccctgccagggtcttcagggcccacctactgcaatcctctattctcctgtggcctcctggctggcgacggctgcctctctctttccctccctggtggctcagagggtaaagaatcggcctgcaacacaggagacctgggttcaagatcccctggagaaggaaatggctactcactccagtattcttgcctggaaaattccatggacagaggagcctggtgagctacaatccatggaattgcaagagttggacatgaatgagctactaacactctttccctacaccctaggacaccagctctatgccaaggcttggacaacagtcaccaacttatgagatcttcacatgaatgtaagacagaggaggaagtcaaagctcagagagctggaattgcttggcctggtcacacagcacagtggtggctggaggctcagtctcccatacctctgctctgtgccctagaacagctgctaccccaggatggtaggggtttgaccaggcctcagggagcctgcagggcagccctctggtttcacagacaccccctggctatgggtgggccaaagaggaagggtacccatcctgccaggatggacctaccaggcccacctgggcccgacgctccttgccaggctcagatggaagcatgaggtcattgggccatccctgctccctgttggctctcgctgctgtgactcagccctgtcttccccaaacctccttctccagggaactctagcaatggtctggcctggccaggtctgctcccgctgcctgtccaccctctcagggcctcccagcctgagtcaccgctcacctcaccacctggcacaatgctcaccgcataaacagactattcccctcccccaggctcccagggttcctctccctacagcccaggagccaggctgaggggtgggggcacttttcctgctgtccccagacttcggccctgaggtccatccccagaacctactttcagggactctctggccttgataggaaaatctagaattgagattgaggcctcagcccagggctcagactgacctgggctcaaatcccagctccttccttgttaggtgggtgaccttgtacaagatacctccatttgaaggagggcaacagtaaaaccagctgcagcccatgaagatttcctacagcatcaccgaggccaggatcctgcttaaaaatgcaggtggctctagattcaaatggtggtatggcctcgcgtaagccactttgcctctctcagcctcagggtccttacctgcaaaatgggaacgagaggaagagagccctcctgctgtggtgactaaatgtgataagacatgaaaaaggtcaagccgtgtctggcacccagggaccaaacacgggtaaacgtttatgtggataaacggtagctgtaattaaatcttaaagtgacgtgtgcataacacatagctcgtgggaagctgccacatagcacagggagctcagctcagtgctctgtggtaacctagacagtgggatggagggggcaggcagagggagatccaaggaagaggggatatatgtatacatatagctgattcatttcactgtatagcagaaactagcataacattgtaaagcaattataccccaattaaaaaaaaaaaaagtgccaggcgttaagtgatcccaggatggttttaatgaatgatggggagatggagagcaatggtctggctcttcactggatgatggagtagcatcagggaacggcttcccaggttggaaagctccagcatcccctctgcaggttgaccaccccacttcccttagtgggtccagaaggctctctcaagagtctttctggctggggctggcctcacagttttccagtttccaggccactcaagaagcacttcactttacagaggacaaagctgatgctcagacaagggaaggggcttgtctgcagccacccagctggaagctgagcccaagcctgcacttccgtgttccccttcttcccagcctgggagctgcctccctggactggggataccctcacctcccagtctcagagagcactctgggagagtctcagagcttgtctgcacactggagactctttatctttgtctctatcttcccccgtaatgctcgagaggcagctccttgggccatggggccagtgaaagaggagaggacccaggagaaaacttctgtgacctcctcatttccagttcaacgggtgatgtgttgagcatgtgatctgaatgagggaacagaggctgggggaggtcgcatacgtaaagggtgaggggatagaaataacactgaccctggggtcaaacagacctgaattcaaaccccaaccattacacgtcaagctctctaacttctcagaatctgaagttgcatctgaaagcagatgccttgagatgcctcaaagggttatgctgcaaagatgaagtgagagcaagagtgtgaccaggctccgtaaatagggatgaaagtgaaagtgaagtcgctcagtcgtgtctgactctttgcgaccccatggactgtagcctaccaggcttctccgtccatgggattctccaggcaagaatactggagtgggttaccatttccttctccaggggatcttcccgacccagggatcgaacccaggtctcccgcattccaggcagatgctttaacctctgagccaccagggaagcccgtaaatagttatagtcagtaataatgatggctaccaccgatggagctcttcctcatttaatccttacacagccatgttactgtgattatacccattttacagatgagcaaactggagctcaaaaaaggaagaaagggcatatgtgatggggaagaaggggtctgacaccagaaccagagaccttagctactagccagccctcagagacataaaataaagcctagccagaggtggttatgggcgtgtgtgctaagttgattcagtcgtgtccgattctttgtgataccatgaactgtagcctgccaggctcctctgtccatgggattctccaggcaagaatactagagtgggttaccatgcccccctccaggggatctcctgacccagggaatcaaacctgcatctctatgtcacctgaattggcaggcaaattctttataccactagtgccatctgcaaaggtggctatggatgagaatattgtgggtgttcagaggtgagttagatctcatgtcttggatggagttgggaaggctggtccatggggtcacaaagaatcacacatgactgagcatgcacgcacgcacctgggggaggcaacctttttgatgggccttgagtttgggcaaaataaatcaagtaagaatggaaggaggaggaaaggcccaccttgcacagaagttgggaggcgagaaagtgtgcagtgtgttcaggaagtgacaagcctctgggaaaaggaaggaaagacaggtccaagtcaggtcccaagcaggccttatgccaggtgggcatttggactgaacaagatgcttcacgctgacaccaggccaggtcctggctccagaagcctggttttcataggaaggcaaattgacccaagtctcaatacccctcatgtctgttgtggcatcaggtactgtgccaaggcaaatgtgggtgagtggagcaagccaggctggccttgggcacctggagggactgtgtgacccagggcagtggaagggatgctcgtggtgcagctggcacatggtgtatagattcacacactttctactacatcccccccaacacacacatgcacacatcactcttttgcaggagtgtgtccacaccaagaggcccacacacaccctgcagcctgaggtgagggagggagagatagcagaggcctgctgaaagaaactcctgtgccaggcaatgggccaaagcgtccacgagctctgccacaaagcctccttgcggctatgaggtaggacttttcttcttaggagtctcggatggatgtgacctctgatactcaggaaaattaaacagtgctatacgcttggtcccaaggttggtgagcagcaaaatgaaagcacagactggctgcccctgccctgagctccgtagggcctgacacagtgctgggcactggggataagtggaggattggagtctgagtcacagggctttgaagctggcagccagagcagcggagcctcagagattccaggggtgggctggcccctgactcacccccacaccctgaggctgccccaggcagtggctttagctcctggccgccctcctgcctgccagagcccagcaaggcctcttctgagtctgtcatggctcaggattcccaggagctgggcgggcagggccaaagcctcaaggcaaggaggtatcctgggcacacctctgctcaggtatgtaggcctagagtcacagtgggaaccccggacctcaccagcctgatgtcagaggcaactaggcacttggggatagctgttaaatgaagaatgaaatactgtatttctgcatggcccagactccgggtggctcaccccttcccagagggaagacagccgcctggtgaggtgctgggtgcgccctggaaagtatgggttctaggcaacacggtgggtgtgactctgcaaaaccaccagctgcgtgtcttggctggtggtagtggagggaggagaaagctggggttccagcccctccaagtgcaggggcctcagagatgagaatccaggcattctggatctccaggatctctggtgggctgttccttctccctgtacctcagtttcctcatctaggtgtaggccaagggactttccctctctggctgcctgtcttttgcttttagaaattatgtccaagccttcatcgttagagcattttgaagatgtaatcaggcagaaaaggggacataagtcttcttcatcttaagcggtgtctctgcaagggcagttttgtctgatgagattaagtcatcttgtatattcactccagccttgggcctggaccatgtgcccaggcctgtgtgctaggccctggggttgggattgcaaagaagactgtgtctcagtgagttcataatttggggggagagacacctctcccccagaaataaccagatatttccaggacagtttaacatgcctttcaaagctctttgacctttccaatatctctaaccacatctgtcatgatggagaatagatgggtgagagattggttgtatagatatatggatggaaggatggataaaatgtcagataatggataaatggatggatcaatagaagggtggatggatggctgtggacatgggaggttgaatggatggatggagggagggatgaatgggtgagtaggtgaatagattgtgggggttgggggtgggaatcattgaatgtgtgatttaggttcctggtcccacagcagatgaatataaggggaaagttccagtcctgcctcttgttcattgtgtgaccctgaagaattcacttctttagctgtagagtgagaatctgtctggaaagacctcacctatcaagtgagagtcatgagcccagcctgcatcccaggtctgttgtgggtatccagtgaaagaggtatggactgcccatgcctacataatggctgtgatgagtcctcagtcagtggcctcacaggcaccggcaacgtgaggtgtttttgctgagggagtgacgcccctctgtggttgctggtgtgttcctaggcttcccacttcctccagcctgcacagagttctctgcccagttaggagcaaaggaggtgacctctgcagaagtgttgctgccagaggctccccatacgctgtacttgtcaaggagtaattgaggtgtcctgtttgttattcatctcagggtaagagtaggctcagcaagggggcacccagggcttgggattagggctttggagttacatagatctgccttccagccttggctctgccacttcctagctgcctgacattggacaaggcatgagcctcagtttccccatttataaaatagtaacaaattatagtacctaccccttaggtaggttatgacaattaataagcataacttatgtaaccacctaacatagagctcagaatatattaaatgcatgtgtatccaagtgcagaattgcgcccttagaactttgaagaaaagtccaaaacttcaagtctagagacctccatcttgaatgctcagtccttggattagtttccttatttcaaaatgttcagtgggactgacattcttcttgacaagtgtgccttgactgaacagtgtctggttttggctgcaattccaggagttccatgggcctcgctgaccctgtcctgattacccttaggttaatagcagactgggcacatgaattatccctttaaaagtggtttgtgtgggagctacaaatctttccaatgggctgagctgtagggaggaggagaatttagaagggggtgtcctcccggggaagccgcaaagaccaggagagctggtcccacaggaccgaggctactcttgcagagacccagtgtggggacgatgccgtgggcggtggcaggccctgctggctcagggtgagctgcagccgatggcaaggggcccagaccacccaccagaaagaggccctgagtctgagtggccctaggcttgagtgggggcagtcctgacctgtagccctgaggacataactcgggaacaggtcattatgggaatgtctaagctccctcagtcccgaaatccccaactcaggctggctccggggccataccctccccagacccccattccttgcagggtccagatatcccccttggccagccccatctgcccatctgctcgctctgctatatgcctgcatggtatgtgcctgcgactgagactctgtgtcccttccattgggactgcaatcaagagagcttcctgaaacctggtggggccaggtgacaacagggaagtggctggttttccagaaagtgaaagagcaaagggttccaggctgggagcaggagtgataacaatgaagtcacagagtctgcagagcttgcattttgggagctggaaactcagggcaggttgattctgcctgtcgtaggctatctgagctgagcaggcccctcacagtcgatgggaagagaggaaagctgtccagggaagccaaggaagggacaggacttgcccaaggccacacagcgtgaatagcaaagctggggacaaagctgcccactgctacaacatcgggtagctgctccagccctttcctgccctgttggacatcatcagaaggatgtttaatcctcgctcctgtacatcctccatcccatgccactggacagctattcgatgggaccaaatttatcattagtacaggggcaatcaaaggagctttggggtccccaggaaggtggcctaggcccatcccaatgtccctgccttcctgccagtgggatccttcctgacagcccttctcaaagggacccagtgcggctcagcttggacccctgggaactacactggtgtgcaggaaagggtgagtctggattagtagcccggagagtgtgtccagcccatcactgtcttgggcaagttgctcctcctcttggacctcagttatctcatctgcccaatgggagtgaaaaccagagagaatttctagaaggcagttcctagcatggtatatttcttcacccaaaaatacaccccaactatcctcttctgccagcccgccctccccacaaatctctgcttcttggattaggctggtgccaagtgtaagtgaagcaaattagtttgtgtgcaaatcaattcctccagcttctgacagggtgatctcctgtgaatccctgtgcctcagtctgcagcctttaccaacccaggcagggagcggggccaggtggggctgaggcagtgcagcagagcagctggtgggggcagtcagtaggaaccagagcaaaggagttgagggcccatgcagccaggtcagccaggaggcatagaggtgactgtcggggcccaggcctagagacctagggtggatattcttgttgttcttgttgtttcttagttgctaagtcatgtccaactcttttgtgaccccatggactgaagcccaccaggctcctccgtccatgggattctccaggtaagaatacaggagtgggttgccatttccttcttcaggagatcttcccaaaccagggatcgaacccacatctcctgcattggcaggcaggttctttaccactgagccatctgtgaagcccacgggccaggaactaaaggaaattcatgtgtgtattggaacagttggcttgtgcagacagaccatgatcatgtcaaaggcaagggaagagggaataaagaaaactgctgtttttaactcggcttgattttctctacctggaaaccaatcttgccagtgaggtggtgctgttcccggaacgctttcagccgctaagaccggggttcgctcaggttcccaggtccggcgtctccatttcacaggagccctgctcgcccggctggagcagcgggcagggaaggagggaaactggagttgggcgcagcctcccaagctgaccctgccaggccgggcggtggcccctgtcctgtcgtcatcctcctttcacagcagagagggatcctgtctcctggtctcgttaattcttctatcatgtttcccagactcggagcctctggttgcctattgtcctgagcaggcattttgcatttatgtaaagattagacaggttagaaccttcgctctcactccgatggtcttttttactttctcaaatccaagttctttccttctcactgcgctctgcttccttattctctctctctccctacctgtctttatcagcctccctgtttattttcttcccttccctgaccccctccttctccccactgacctgcttttcctctgtcctctcttcacagttcagtagtttgaatcctctttctcccccctccaccaccgccaccacaaccctaaccttgcttaattccatatttatcttctcccggagcctcatagaaatgactgaaagcattgctcacctcattccagaaataactcttctaaattcttagagaggcaccgcacgggggagggtgtgagcactggacagggagtcactgtggtttactggagagaacaagacccaggttcctctgtgggctcttgggtacaccagctgtgtgaccgtgacaccgctggcctctggccagtctctgtttcctcccaggcagcagtggagctggcacccagatgagaacagctgtgtgtaaggttgtgaaggagagaggacggtggtgccctgcacacacacttgtgctctgaaatgtttttcctgcttccaccgcagcctgagccagtcggagggaaggaaggggatgctaactggtatctccctccttggttctgctctgctctacagggatcacacatgcgcgcacacacgaacatgccctgggaagaaacaaagctgtttcttcaccgtcatctatttctcccttccaaaatgtctaatggtaaaatcccaactgaacacaggagcaaaaacttgggctttagtgggttcctgaatttctccatttcaaatccaggccttcattcattcaccgccccctccctcggacagcactcactcagagtctcctactgtgtgccagacgggctccagggctggccttctctggagctctggacctcgagattgttggggagataagcccaatgtcatgagtcaggcatgagagagagcacgggttctgggagttccaagaaatgagagggcctttcctcttgtgcctggagacagggtccctgagaaggagggactctgagccagccgaggggcaggagcaggatgctggcccccagggagcccctccatcactctgccttttttgcagaaagtcacagaggtgagccaagacatcctgtcctggccaagatgggaggttttcccaggggcttttggtgtacatatccacaagccacctttctggaaagggctctgagggccccttcttagcatcaaggaaatctgtgggtcacataggttaagaagaaggaaagaagggcacttcctgggggaggtggggaggaggcggctccaggctggtcagtggtcaggggtaaactgtgtccttccctaaggaaagcaggcccagagaaggctctgactctcccaagtccacacagccttgtaggtcatttacctcccacgcagcagaagggacaccctccacctggttgacagtaggcagacaggaaagcagggtctcctccaaggaaagggagggttttgcccatgggacctctccctcccaactctgagctctgggcaagacccatggagagtggggaggggctcacggcatttggaggatgacttgagggggtccagtgggactgaaaggggtccctggggacagcacgggagcctcaggactccaggaggtgctccaggctcagagggagcatcctcccccctttttcctccctcatcctgccctcctccctaccgcagaggctggggcgggccgggcgccctgggaggaggcggtgtccctggctccctgcccaccggtgcagggctggacgggcaggggcggagccatgcctggtgttataagaggcagccagggcaccgaggcaatgagctgtcgctcagcttggcagcaggacgctggcagcaggcacactccgcactccagcccagcctgagcgtgcctcaccactgtggtcgccatgcccaccgccttgtgctccatcgctctagccctgctcgtggccctgcacgaaggtgagcaccccccacgggctcagcagctgcagcagccccgaggctgcttgtctgtatctcctgctggggctctgtgccccccaagccagccgggggccttcaggggcaggagttaggtggcttgggggctgcaggaggctgtgctattagaggtgctgccgtcccaggacagccaccggtccttccaacccagagctgctggggcttccccaggctggcccagggctcctgagcactgagaatgccaacttcctcgattatgcaagaggaggagcccagcgggtcccccatcccagctgtgccaggcgccctgacccacctctccacttttctctccctcctgtgcatgcaggcaagagccaggctgctaccacccccatcccagagcaaccagcgcccttgccccgggcccgaggctcccacctgcggactcgacgttgctcctgcagctcctggctcgacaaggagtgcgtctacttttgccacctggacattatctgggtgaacactcccgggtgagctactggagggatccaagaggggttgcagggggcaggggtggggaatgctggcatgctggggaagccctggcacactgcagctctctcttggagtgtggggctaacaacaatagcaatcagctattgcttcagttctcacgtgggggctgcctgagcaagacagagggctgtctcatgaaaatcctcacaaaaagcctggtcagaaagtgttggctccattttccagatcagggtactgaggctcagagaagttaggtgccttttccaaggtcacacaggaagagtaagtggtaggtaggaggctccagcctaggtctgcagatgccagagcgcacagcggctctgccatgctgcctctgtataatcttccaagaatgatatgattaatgacagcacccatgtcttgactgcgccaggccctatgccaagcactgctggtgcgttatcacctcgtgaacgcacccccatcctccccagtgaagcggggactgctgctgtccccaaatgacagacaagagacctgccccatgtcacctggcagagccggggtggggtcccagagctgtctgttctgtctgcacccgcgctgcctccgggccactgcatacttcaagttgaagtttctctgtgtgtttgtattttttttttccttctccaaattgcaaaagacaagagaagcccggcacgtaagcgtgtgtggagctaatccgcatccaaacactggctcagggcgggaaccctgccagtccctgcgtgctgggtctacctggagtctctgcagctccaaccacaccgtctaaaattagctcaggcatccgaggtgctggtctgaccggccacggggccctgcccttcgcctggcccgtctcagccagacggaatctgaaatcgatctcagccaatctaatatatctatgcacacacacgcacacgtgcaggtcaggcacacgcaccattttaaagtcaaaactctaagaaacacttgggtcacccttccaggcaagtggtgaccggatggaggcagctgagctgtgagcctgagtgttcacttctgtgagagggcactctctccctttcttccagactagttgggggtcttctttgagaacagggggaccagcctgactccatcagttcaaattgctgtctgggagtgagaggggcagggaggacagcttccacccctcccccccatgctgagcgtcttactgagcaggaccagggcagttgggagggaacagaggcccgagagggtaagggtcttgcccgaggctccctggcatgtaaggaggaagctgcagtgggaattcttgagggcaggagctggttacttttgctgccaccctggtggcatggatggctatcccagtgtgcagtgtggacagtcccagcttgccaatggtcctggtttatctaatcctctctctgtctctctccaccctacaccactaccttgctggcggcccgcccacagacagacagctccttacggcctgggaaacccgccaagacgccggcgccgctctctgccaagacgctgtgagtgctacagtgccagggaccccgcctgtgccaccttctgccatcaaaggccctggtaagtgggcacccagcctgcaaggggccagaggtgactgctggcctggacctgctctggagggcagggtgtctggaaggccagcagtggcggactgttagtccctaggtcgtgcccgactgtttgtgaccccacggactgtagcctgccaggctcctctgtctatgggattctccaggcaagaataccggagtgaattgccattcccttctccagggtgtccaggaggccagcagaggcgtggctaaatggtggaggaggggccaggggagcagggtcctgggggtccagaggctgccctgggctgtggggcagcctcccttcctgcagggagccagtcacccttgagtcttcccccctgccactacccccagctctgggggcttctgagaccattgcgtccccactcctgggcaggaggaatcctccccaggtgatagctgaggcagcacaggtccagagaggaaacaggacttgtcctgtcaggctacacagccagttagacgagagctgggccttccgccttagtcgctggggctctgggacctctggaactttctcagtggagaagcagtagctggagttggggggccatggcaccgtccccgagctgccacaaagcgcctttgccagtcttttggccctctggacctccctccctccacgcggagcgttgggaaagcagacagtgacttcaccctcccctacctcccgctctcatgaaggcctatgggaaactcctcccctgagacctcagctgtggctgcagccctgcctcagtttccctgctgagggttctgcttggctgcaagtggccagactctgggaaggccagccaccccactgcctctttctgaggctgagaacgcattcccagtggctcagttttcctcaggccccaccccacctgggaaaagaagggtgccaggtgcacagggtggaaatggatctgctcctgagggcgggtcggggcggggggctgggctgggcctgcagccaggcagcctgggggccctggacagcccctcacttgggccctaatgctgttcactcaggactgatgcggtggcagtcccaggcagcgggtcccctgcagctgcgttccaggatggcaagacacaggccacagcaggagagctcctccagcggctgaggtgaggggcccctacactgattgagtgccttctgtatgccttgcacatttcccttattctccatatgacgccttgggtccttatggggcagccaatagcagctcagacagatgaaggtgtttacccaaggtcacagagcaagctacagcatctggctgactcaatagcctgtgttcttaaccactatgctctttgttaccgccaggcctggaagtggacttttattgagggtttcaaggcttgtgactgtggaaggttcccaggtgttcattcaggctgtgtctgaatcaagcatctcccacatgctggggtccaaacggatgctacccagcctgttccctccctgggtcccagactggactgtctccctggtagctacaacatggctcagctcaaggcttggcatccaggaggtgcccatgaacgtgtgtccaaccaaactgacttgagaacagaaacctatagccagtcatgtggcagggtggctgaaggggcagcatctgagctagaaagtcccagccctgccacgagcaagctttgtgaccttggtctgctcactgaacttctctgtgcttctggttcctgtctgtgaggcagggacaccgctgctatccatctcacgggcttgttgaagtttagagcagttgacatacatgaagagccccaagaaagcccaggccctacgggagctctgaaggttttagccatcccgaacctctgtccctgagggttcctcagggctgcccagggccggggtgcagcctagcccctcaagggtccacatctctgtgaggaggcggaaacataggcaaaaagacaggatggccggctaggcaggacccaggatatactgaggaactatcttaaaaaaataataataaaatgaaagtgttagtcactcagtcgtgtctgactctttgcaaccccatggactatagctcaccagactcctctgtccatggaattctccaggcaagaatactggagtgggtagccattcctttctccagaaaatcttcccaacccagggatcaaacctgggtgccccgcattgcaggcagattctttatcatctgagccactagggaaacccaggaaatgtcttaagatgaaaaacttcaaggtaagactttgcaagtacttggcattccataattagcaaagagtgttttcgccagtctgtactcagcctcacaccagttcaggcctgtgtttattttacagaccaagaagggggttcagagaggttgagacccttgcccaagttcccaaagctgggaaccagcctcccagttcccaggctagaacgccttaagccagagtgaggccacctagatgacggcagagcccctaccagggtctcagccagattcaaaggactgctaggatccatacatatctggagctggaccttgaagaatgggaattttagggcacggagtatggggtgagtggaaggtcaacagcctgaagagccacagggatagaggtgtggaagtgagagggcaatcaggggagagccacggggctactcttggccgtgcagtcaccctggtggcacttgatgttgagcatcaattttgtcaaagctccttgtgggcagaaaagcttctaacctgccccggcctctccttgaggttcagaccttgttttcagggttggctgtgaccaccctctgacctcttggccatgaataaggaatccagaccctatgaccgctgcctctcatggggaactctcaagtgatgtatatctccagagatgctcaattgacctctttccatttcagggttatttctgcaaccaagatccactttgctaggcaacagcagaagccgacgagggagaccagacctacacactccaggcagaggaagagatagctctcgactctgggagaactttgggaaggaagcctgtgtggatacaggaggagaggggcatcccagagctgggagaccttccgacctgtttcctgggccagaaaacccagctgctggagcaggcacaagctctggcctcctcgccctggggagggggcctcgctcaaggcagctccgtgacaccaggaaagtcatcaggccccaggctgcagcgtggcctcccacactggctccagttcctaggccctgctgaaaggaacggcatgcggaatgtgctagcctggaggtgtcctgtctggcggctgtgaaccaggaacaacgtgcagtggcgggcactcacacccaagccagcccgagtccttccagggttgaagtcccggccgcccccgacccctcacccccgctctgtcccctccagccctcgctctccagtgtccttattctcccttcataccctcggggcactcttggtgagaagggcctgcaccacttcacctgtctgtatataacttatttgctctaagaaatttgacgattccgattatttattttaacgtatttttttagactctcaattatttacctgcgaacttgtgtttgtaataaacaacaaaataatgctctagcatttggtcttggttgagcaggaggtgggaggcacttttcaggaaggggctacttagaagtgaagggaacaaagggacggcggggaaagagcctgaggcaggtgtggagcactgagttccacacccctgtgccccggctgggcatcgctggctgctgacccaccctctctggacttttgcctatcatgtgcctagacagccatttgcagctttgatatcccgggttccaggacctgtgtttctatcaggccggtaagtgttggccaggcctttccccagagcatgtttcataggagccaagactataaggacccacttctgctctggttgccacccctgaggttcagagcaaacctgtccagtgagggctgtgtgctgttccaagactgtgtgcagccttactggccagggatggctgttgtaacggagtcacaggctggtccttatccctcaccctgggcttggacagaccccgctgggggcgctcaacacttctctcactaaagaagcccagggctctagcactggcttggctgatcctgccaaggccccaggaagctgctcacctgagtcccagggacagccagaagctacccccgctggcagctcctgagacctacagcctccactgctgccaaatccccctgcgaacaaactgttccctttcccctggccggcctctgctgggaatggtacgctgtggcctgagccagttattgaaaaataattatttacacactactctaagcctgccttgtccatggagccagccccaactccctcctgggagaagaacatgttgacgcatattgaactcctactgtttgctggcattttatgcagataaactcacttcatcctcatgacaatcccatgatatagatacttttattatccccattttacagatgaggaaactaatgcacagagaaggcaactaattttcctggggtctcgcagcaagtaagtggtagcatcaggatttgaacccagagtgtatagtacacatgtctatatgtactgactaaatatttgttgattgaattcatggattaccactgtagtatgacattgaacaaatcttcctctttctgagcctcagttttttaatctataaaatgggaaacagtactttccactttgtagagctggttgtgaaccctaaatggatgagttatggtgctgggctcagtcctgggcctgatgagaggcaaagccgaatgtcaggccgttagaagtgatgatgtaacaagagggacaggcacaaagctgcaggacctaagttggggggagattggggctggctggtgtgcagaggcatggtcagagaaagatgcacgactaaggtgccactcccacagcctaaggagagtgagactcacatcaatagaaggaaagtgaagagggagccccagacagagcagacaggaagggtaaaaggttttggcaatgggagtgacaaaggggtttcccatggaggaccccatgtggctggagcatggtggggagagagcagcaggagaggaaaccaggactccctggaggccaaagtagggagcctgcactttctctcatgggccatggggaccctcgaaaggtctgtgggcagcagggacctggtaaagccagactttgaaaaaatgccagagggccacacagggggaccctgaatggggagacagaaggcagggaagcaagtcaaccgctggtccttagggatccagcctgggtggctggggttggcgatggagccacacagtcacttcctacccaggattccggcacacctctgaaatctcactgagcctaacgccaggtgaatctcactccccagcatcctgttcaaaataaccctgcccccacggaaatcccaaagcaacggccaacagtcaggctaggcagtgatgtggggcaaccccagcatggcaggagtgatcgagaccaggtagaggaatgtaggttgaaggtgtgtccgaggcccagggaattaggcattcactgccctggtcagagttcagagatcagcgaccaaatgattaagtaagagacaattagagggaggcccagaaggcaggtgaaggcaaggcgataccataacccccaggatccttactctcaagaaatgggggcccctggcttgggccctgcactctagccctctgccagccatatctttctctccaaataagaagtttgcagggtgaagggtcatgaatacccaaagtctgagcctgcttctaaaccacattccatgcagcaggggcctcagaagtgtgggggaaggtgggatagagtttggaagaagcagaggaaaatttatgaagaactgttgccaaatcaaactgaaccctgggaagaaaggtgtcaacattttagaaagcatatctggattttatgggacaaaatcgtccctttttcctgcctttttctgccttttccataaatacttacaggtttggtttaggctttctgagttaaacttgtgttccttttaactggaacaccaggcggagataggccagaagggggcacagggtgacccagatttattcgggtcatgtgcatgcatggaagcagagtcagaggggagtggagttccatgtccaggactgtgcagcctgatacatatccaggctacagactggccctttcctgtcctggactgcctctccctccactctctcattcagcaaagaaccccaaggaactagtttcactcttgccatctcactctctctctgaacctcagggatttcaattgagaaaagtcatttgcctatcagggcaatgaatcattggagtgtggccatccatgcgttcaacaattatgaacaatcaccgttcagagactcccgtaaacaaggcagacacagcccctgccctcacaggccaagaggagagcctttcaataaagcactgttactatgaaggtagaagtgaaagcatttattgagtgctcatcaagctcttcttgcacatggattctttggatccttgcagcaaccttacacagcaggttctatcatcgctattcccagttgagagaagagataacggaggttaagcagctcacccaaagtctcatggctagcatgtggctgagctgggatttaaatctcaggctctcagcctgtctgctgtcctgctgctctaagcaggtagatccatacatagtgtgattgagcccctcgggtgggagagtctgggaggcttcctggaggaagtgacagttgatcaagagaaggagcgggtggacagagtgttcaggcagggggaacagtgtgtaggaagggagctatattctctgtgcttagtcattcaatcctatttgggacctcttggtctatagtccgttaggctcctctgtccatgggattctccaggcaagaatactggagtgggtagccatgccctcctccaggggatcttcccaacccagcgattgaacccaggtctcctgcattgcaggtggattctttaccagctgagctacccaggaagcccattctcagaccctatcagggaacaaaagaaggaggcatggggaagactggagaggggttgctagcggggtcgggggggtggtgggcatgcggctacaagcagggaaatccacagctgctgtcacctcacccccaatctgtgacagcctcagacaatgtccccctggacaatattgccatgcctgaaacacacctttggatcaaaccgtgcttgcgccccttggggtttccctaggctggcaaggaagacagacaaggcaaagtgaagagacaggaggtggataggttacgggctgcccttccagctgtgtgcccttcctgtctccctgggatctctgctcatttcatcccaggggcgttgtgggttcacagggaaagcttggggaaggagtagggtttgcacacactgggatgagggaaacagccggagcatagaagaatccgaaaagaggcagcaagcctgattggcaagggccaggctgggaacagcatgcagtgccaggaatttgaacttgagtgacggggagccagcgaaggtggctgatcaggggagagagccaggacaggagctggccttgggcagctggcttgtcctcggctcttcctgcctccccggccagtgcttccagctcaagggggccctcccagcccctcgcaggagagacaaagtgtgggccttgcctccgcctgccagggaccggagccaagagccctcagcagctcggaagggggccatgtgcgggcccgccaggagccctggaagaggaatgtggcctaattaattctccaaagctcagagggcctcgccttgtgggagcagctgccaggacaggcctgccaggacgccacaggcccagcccgtctatcattcagtgctcggggacagcaggctggaagcctggagacaggggcccagggggccagccccttgcctccaggtacacacgtgtcctccagccccttaacagaaaatagtgcgataatagtaataatcgccaacaggccttgagggcttaaaggtgtgtcagactctgtgcaaagcctgttatactcacttctcatctattcattacgaaggaccagtgacagggaaactgttaccatctccattttgcagatgaggaaactgagggacagatgggtgaatttccctggccgaaatcctgcaatcaaaaagcacacgcagggaagctaggattgggatgtaggcagcctgggccccacaagcatgttgtcataagcactgctgagccagcccagcgaggacatggaggcccagggtggagcgatacctttcccggggacagtcgactaaaaacaggccctgggacattgaatagggaagaaagaccacacccctgtcctctgcttgaactgcctcctcctgaagtttctcatagggcttttcctgtctcagcccgtaggtcatcctcaaagacatgtgactcgctactccaggcagatgggctggaagaagacatgccgtctccctgggatccctgctcatttcatcccggtggcgctgtggtggctgcactggcagctgggcgaggtggtctcacagcttcctcctagcccgctttccatccgtccacggaacacatcccctccaaggcgggctctgaatggtgcagggacggctgtaccagggccttccaactagaaagtggcagacccaggagaagatgggcacacagactggcccgaagccaagactctgctcttcctcagcagcagagcaggaggagggcagtgcagccacatcgcatcccctctctgggcctcagtttctcatctgctgtatgggcctaagagcattaactgtatagtcttgtcctgcattcatgcaggctaagttgcttcagtcatgtccgactctgtgcgatcctgtggactgtagctccccaggctcctcaatccatgggattctccaggcaagaatactggagtgggttgccatttccttctccagggggtcttcccagcccggggatggaacacatgtttcttacatcttctgcgttggaaggcaggttctctaccactagggccacctgagaagccccatagtcatgtcctggaactcattcatgtgtcaagtactgtccgaagtagtttacttaatttttaaaaattttccaaagcaaggttttttcatagctttgtaacatatcaccataaggctgcaccatatgcatctgttactctgtaggtgtgtattttagtttgtcccatttccctccaatgcaatgtttacatgtgtgctacatttatacacaaattttatattcattcctaattcttttttgctgcatattttttatggagacataatttacaccccataaaatccactcttttaaagtgtacaattcagggtttttttttaaatatattcacagttatacaaccatcaccactatctaattccagaacgtttccatcatcccaaaaagaaacacctcacctgttagcagttgctccccagatctcacttccccggcctctgtacaccacaaatctactttctgtcactatggatttgcctgttctggacattttatatcaatggaatcataacgtacgtggccttttgtgtactgctccgttcacttagcacaatgtcctcaagatttgtctatgttggagcaggtgtcgatacttcacgcttttccatgactgaataatattcccttatagagacagatcaggcttcccgggtggctcagtggttgagaatccccctgacaatgcaggagatgcaggagatgtgggtttgatccctgggtcgggaaaaacccctggagaaggaaatggcaacccactccagtattcttgtctgggaaatctcatgaacagaggagcctggcaggctacagtccatggggttacaaagagttgaacatgacttacaactgaacacacacacacacacagatcacattttgtttatccatttgtctgcgttgtttccactcttttggcttaagcactttactttagccttcagtgaccctatggggaggtgctctcttttcatcatataaacaacaagactgacatccagagagcttaagtaacccatgcaggtcacttagctagtgagcggcggtggtgggctttgccccaagagtctggctgcagagacagtggcctcaaccactgagcatcactttctcttcagtcagagtaagatagtataaatcagcacccacagcaactgtgccaaaagtggtacccacagggcacttaacagagggtggcttttctcagcagcatttctgacactggcagagccagggtctgccaggcagggcctgaagctggagcaagagtgtctggacagccagtgataatagtgactatctcagtacacgggtggttcttccagcaatggggacatctctccacacttggtggggggccgtgggcactgactcctctgctgcacatctctggcctgcaccccagagcccatctctcctcccacctccacctacaaagtcatggctcccctcctgtccccaaggccctgacactgagtaaccgaggcagcattcttgggtgaggtcaaggtcagagctgcagtggaggctgcatggacccttgaatgggtctctgtctcctcaggcctccacctactaaataattagataagaaatcttaatacttccttttttaattacaaagcaatttaaataggacaatatagacacaaaggcttgtggctttaagataatgaaaagactataggaacatctaaaataaaatgtctcttctgggcctcccactccaaggcaacgactctgagagtggggtaaatagccttttttttttctatgggttcagatatatgttttctatctaacgttttagaggtattaaaaataatgcacggcaacataagtttctctactttacaaccttttcttctcacaccaaaggcatctttccagaccaatacaaggcttttaccacctcttaattttaacagctccacgtggcccttgttaaggacaggcagttgtcacttgactgtccacccactgaagccttttggatggcttgcatttcttgttttcataagcacactacagtaagcacctggtttatacatctttgtctgcagaggacagatttttagacacgaaatttctaggtcaaaggatgagcacattttaagtattctgccgagaatgagattccaatttgcattcttgttcccactgggtatgagtgcccttttcctcacaagccttccagcactgggttttatccatctcttatcgtttgctgccctggtagcaaaaccacttcttcataaggaatacgatgtgcaaaagagctttgcttgatgccacccagggtgaggagggtgaggggtctggagatgctccaatgtctcactctgtcccctggtgcaaagaactcctctagggacttccagcactgctctccaggattctgtttggctctagggctctgtctctcagttccactcaggggttggccctcagggagctaagaatggaggaggggctggccagtcttcctgctcagttggccccagcctcccctaatagatgtgtctttgagtaggcgctcctggggacagcatcatcatgggaaagcgtgtgtgcgtgttgggagcggggggactctgggcacctgaacctgcagatgttcctaatgggggagcctggggcatcctggttccctctcagcctgccatccaaactcacgttttggaaaagactgaatctggatcttgcctctgcccaggtcttgctgtgtagacccaggcaggtcactgtcctttctggactccaggctcccggctgccaggctgggggaatccctttacagggtagatgccgaatctgctccctctggagactccacactggccacaccatgcgcatgagtcacccccaagttggcaggctgagggcaggggaggggcatggaggcaagagaagggaggctcgctccagatgactttggtgccacatggtgagtctggcgcagtggagtcttgcctggctaacgtgagtgtgtgagcacaggcacacagggcacaccgacgtgtgaagtgcattcttgtataccgaccggggatcctcctgctcaagtctgggcattcaggtttacagctcaggtgatgagtgtccatacacaatccatgtgtgtgcacattcttgtgcgtgtcaacacatacacgcatgtgtgcctgagtgcccctgagcttgtaaatcttcacctggttgtggctgcctagatgtgtctgcatgaacgtgtgaaagtgttagttgctcagtcatgtctgactctcctctgtccatgggatttcccaggcaagaatattggagtgggctctctggggcattttcccgacccagggatcgaacccttgtctcctgcattgtaggtggattctttactatctgagccaccagggaagcccagatgtgtgtgcacacatgtgcctaaatccgtgtgcatgcgtgagggtgcaggtgagcctgcaggatgtgcgcacacgtctatgattagagattacgggtgtgtgggtgcacaagtgtcacaaacatacacactaatgtgtgcgtttgtgtctgagcacatgtcaaaacacatgcatagagtatccgtagtgtagatggagtgcgtccacatgtatgggtctagaagggcttcagtgtgcatatgggcacagctatgtatgaactattacagtgtaactctgttgaagtgaatacacatgagtgtacatttgcacccaggaggggccacctcagcgtctgcaaactatgacatctcctccagggcccatcccacctggcctggacctctcccctcaacccacactgaggaaccaacagaaggacagtgtcattgctttaattacaggaagactaagtattttagtaattagtaagtcattataaagcttactgcttttaagaacaaaaatggctatattatagatacaaaatgcatatggaatctgaacaagaagcatggaagtgcaggattttccaccccaatctgggtgggagggcttgaagaccaagtatacacagggctcaggaaggcaagggagggagaggccagagcagagagcccctgcctccatttccaaggctgtccacacctgacctccatccctacctccatccagcgagatatcgttctgggcccagagggccccaaccctggcctgagtggaagtcagggagtgagtgtgtcagaccacctctgacagcaaccagtcaaggcaaggcccttctcattctcccttccgtggcctataactctaagatagtcatacctacctgggttttctcaaagaacctcaaaatataacctccaacacgtgcctacctccttcatcctcccagaacaatttctacctcccacccccagctcctgtccttctctcttggcctgcactgcctccttgccacaggtctgacccacaaacttctactcattggtccaaaaccacgcctgtgtcaccacccagctgtacaattgtcatcccagctggactgtgaactcctgaggtagggaaggctcaggcattcttgggtccccagagcccacctcaacctggcacagcttagatatcactcactatctgattttagaaactgagataagaggagaagaaagggagagcccctgggcgcagcaacgtttggtaaacacggcaggtcgttgggtgccccaagactggatgagtcagcctgacccttgccctggaggaggaagaaaaagtgtcatttatcaggctccacctggtgccagcatcagccacacacttgatccccaccacacacctgagaagtaagcaatatttttactcccattttatagatgcagaaactgaccctcacagaaagtgagtcagcagcagagctgggactcaagccttcctgactcagcacttcctacaggctcatccccccaggttctttctctctgnnnnnnnnnnnnnnnnnnnnnnnnnnnnnnnnnnnnnnnnnnnnnnnnnntcctcaggaacagcccttaatcataaaggattggggtggtgggtagatacgccagctcacttgcaccatgggtggagcaactctaaggctgcttccacaccctctcccggaggtctctggaggggctaagccctgtttccacctgttgctcattaacttgtctgtattggctgcgcttcctttctcccttccacatcttttatggatcttagaaccacctcgaaaataaactccatgccctcgaatcttagtccaggtcctctctggggaccccaacccaagaccaaggggcagcagccacagggactgtgagtctgggaaagccagggggacattcttgcaaagaggcctcggccacagaggcccagagacacatgcaggtccagacccatgggatgagccctggcaggcgggaggccagcctgactgcagctccagagctgcacacagtgtcaggctggcgcatgaggacgcaggagcaccagggtaaagagggcacgggtgtgagcacagcagctgatggcaacggggtttatctcagggcccaagaccacacccacacctccctcccttctgcagaaatgggcctggaacacctgtgccctggcaagccctagggtagaccccggctggaaaaccccagggctcccagctggccttctactgctcagcacctctggcctgggtcctggcagagcagggaggctgcctggggaaggtcttagatggcaaatctgtacaattctgtgcctctctgtccttcccattcaagaaatggcacagggccttggtagggccgaggaagtgaatggagggatcccagcacctcagagggcccctgttctctgactctgccaggacatagtttgcacacagaacattagatgtggcatatcttgcttccccacgcttttcagaagagggtgggcttccctgatggcactagtgttaaagaacctgactgccagtgcaggagatgtaagagatgtgggttcaatccttggatcaggaagatcccctggaggaggacatggcattccggtactcttgcctggagaatcccatgaacagaggagcctggtgggctacaggccatggcatcgcgaagagtcagacacgactgaagtgacttagtatgcacgcacattacttaacccagaggaatcaagttctaacggtggaaattcaagcattggaaaagacatggcttgattttaggagttggccttccctcaaatcacaccatgtcaaatctcagacaggcagcatcatgaagcagaaaaggcacaggctgtagagccagacagacctggctcaaatccttggagacagaaaagcccctcatcctgagctttggcttccttggctgtgaaataagttgacagtgtccactggcgggagacctggcttcagtccctgggttgggaagatcccctggagaaggaaaaggctagccactccagtattctggcctggagaatcccatggactgtatagtccatgaggttgcaaagagttggcactactgagcgactttcgctttcactttcactggccccaggtaagcatcttcaatctccttcagtcctcagtctggtgaggaagtaactccagagatgagcagatgggcactaaggcggccaactcctgctcaggtgggtccagagtgattcagaagcctgctgccccctgccaggggcctctgaggctgggctgtgccctgtccacttcaccctccccctgtgtggcccagccctgacccgagactcacccactgcccggtttcggcacctggcccacagttagccagggctgggtcttcagtatcaacattcctctgggataaatacctttggcctcaggaatgctgggaactgggccaagaggtcaaagggcctggactttatcctgagaagctcttaaagcctcacagcacctagacgaggcaggcgtagcccagtcataaagagaaactgagagccactgatttcatccaagaaaagaaaccaggggcctccttggttatcctccataagaatcaggacagcagaagatgaaaaaaatggactcaaagcaagcaacagactggaaattccacttctgggtatttaccccaaaggagtgcctagatatgttcatctgaagatacatacaaggttgttcacagcagcattgtttataatagtctcatactaagtgaagtaagccacaaacagaaagacaaatatatgattttccttatatggggtataagtgataccccatatatcgcttatacaaatgataaaaatgaacttatttgatgaaaaaaatgatacaaatgaacttctttgcaaaaccgaaacagactcacagagaacaaactatggtcactggagggaggagttggacatcagcatgtacacactgccgtgtttaaaataaataaccaacagggacctggtgtatagcacaaagaattctgctcaatacagtaataacctaaatgagaaaagaatttgagaaagaatagatgtatatatatgggcaactaaatcactttgctttacatttcaaactaacacaacattgttaaataactataggtaggtaggtagatttagttgctaagtggtgaccgaatcttgcctgccaggttcctctgtccatgggattctccaggcaagaatactggagtgggttgccatttccttctccagggatcttcccgacccaagaattgaacctgagtctcctgcactgcagtcagattctttatcaactgtgctatgagggaagaaaactccttaatgtaattaactatagttaacataattagtgagtgaagtgaaaattgctcagtcacgtctgactctttgcaactccgtggactatacagtccatgaaattctccaggcaagaatactggagtgggtagcctttcctttctccaagggatcttcccttaactagaagttaattaactaattagaagtaaatataattaactatactccaatataaaatttaaatatatactagaatgttcatagcagcactgtttataatagtctcaaactggaaactatgcaaaagggcagcaacagtagaatgaataagtaaattgatccctggtggctcagatggtaaagaatctgcctgcaatgcaggagacctggattcaatccttgggtcaggaagatcccctggagaggggaagggcaacaaactccagtatttttgcatggagaattccacagacagaggagcctggtggggtccttggggtcaaaaagagttggatacaactgagcaactaacactttctttcttcagattgaactacaactgataaaatcatacggatgatcttacaaatgaaacaagattccatcctttaagattccgtatgtctatatctatatccatgtatatctatatatctccagttttagtggtgccagaactcagcaaagtgatttcccttgggggaatgagggcaggcagtgactgaaagggaactggaagggagcctttggagaagcagtcatgttccattttttgatatagcttcagggtgcatgggtgttcttgttttgggaaaatccttcaagttgtacatttatgatctgtacacttttctatatgaatactatgctcttgaatcttgtgttggaatcttagcgatatgccctcttctacgtatggcctcttttgtgcaacattgtatttttgacattcatccatgttgtgacatgtaacaagatttcttctttttcactgccatgtagtattctattacccgaatagaccacaatgtgttcatccattctactgttgatggaaggtgggttgtttatggtctaggagctattacaaattagtgctgctttgaccattttttgtacctgagttttgatgaataaatgtacatatttctgctaggggtatacctaggggcgggatggctagctcatagaatatatacatcttcagctaacggcaccccactccagtactcttgcctggaaaatcccatggatggaggagcctggtaggctgcattccatggggttgctaagagtcggacacgactgagcaacttcactttcacttttcactttcatgcattggaggaagaaatggcaacctactccagtgttcttgcctggagaatcccagggacagtggggcctggtgggctgcagtctatggggtcgcacagagtcggacacgactgaagcgacttagcagcagcagtaatgctttggaaggaatggtgctaaagctgaaactccagtattttgggcacttcatgagaagagttgactcattggaaaagactctgatgctgggagagattgggggcaggaggagaaggggacgactgaggatgagatggctggatggcatcaccgactcgatggacgtgagtttgagtgaactcagggagttggtgatggacagggaggcctggtgtgctgcgattcatggggtctcaaagagtcggacacaactgagtgactgaactgaattgaactgaactgaatgattttccaaaatgttttaccattttggacttccatcagctgtgtatggcagcctcatattctcactagcacaagcacaagcatgctttgtcttgtagccattcaggcaggtgtgggataatttgcatttccctgctgcctagtgaagttgagcacctgtcttagtttgggttccctaggtggcgaccctgagacaaggatttgagagcaagaagtttcttggcaggtgtgttcgtctcctaaggctgctataacaaaataccatagactggtgtcaaaacaacagacctttattttctcacagttctgaggctagaagaccaaggtcaaggtgccatccacgttcgtttctggagaggcctctcttcctgccttgcagatggttaccttctcaccgagtcctcacatggttgcttctctgtgcatgtatagagaggcggagcaatatttctggtgtgtctttctcttgccttcaatgtaaggacaccattagggcctcaggcttatgacttggtttaaaccttaattatctccctaaagacctgatcaccaaatacagtcacttgggaaggtagggagacgtgattcagtccatcatagcaggcgatcctaggaaaactcacaagggagtgaagaagtgacagcatgcgggaggaggctctggaagtgcgtgtccacaagccagttgccaccctgggcatctggagttgaatcccacggggagattctgagaaaccacgtaaaccacgccctcgagagttatcccactcagggcgccggggaggtggacttctatacatcgactcctgccggtcactggttgaggcctatttcaaagtatgggggtgtggggtgggggcggtgatgttagctccctggtgcctcccaggctcacagaagccctgaggctcggagctgcgggtacacaggccacagcacgtcctcacatgctagtaacggtcgaatcctcacttgagtgaagtggttactcttttgaagctgagttttgaaggatgtatacagatgggccaggcaggagacagcattccagcagagggaacggtgnnnnnnnnnnnnnnnnnnnnnnnnnnnnnnnnnnnnnnnnnnnnnnnnnnggtcttccagggccccccagtcctctgactctcccaaatcctgactatgtactgcaagcaccactgaatgccagaatgtctcccatagccagagacatagacgaagttcccagcagagaggctgcaagccaggtcggggccggagcaaggacaaagggaccagcgttcccagggcaacagaggctcaggccacaggatgggcatcagagaagtcaaggcagatctcaaggttgacattaacaaaggaccttgagctaaggtatggggtcctgaagccctgagaaaggcccacttatactcacccccatgccacctgagttcagactgtgctgatcctcctcagtgtcctcccaggtccgaaaagctgtgcatgtttacactgtctgcagagcctaaaccaggaaggcagagggtcagggagaggcgggcccagggctgtgggcttggatgagaaccccctaaccaccattttgacctgaggggaactgggaagtgggaacctaagacaggtctgagcaggctctgactgctctgcagagctatcagcttggagtccagccacatccagttctgtatccaaataacaggcatctcatctgcagaagtataacctggcagggcccaggcatcgtgagtatctgtcagtccagccacactttggcaagtcatgtcccccctactaatcctgctctgtgtggcttgggtggggcagtctccccacacccaggcggcgggcttgtgaaccatgcctggccaaccatgtccccacccccaggtgccgtgattgactcaaggataaacccaggaccctacccaggccaacaggagtctcccttgagacttttactagcgatgtctggaaactctctcatctgctgagatcctgagctgtaaagaagagatgggaacagctggtggacagcttgcaagatagagaaaatctgcccagaataaaagaaagaaagaaaaaaaaaaaaaaaaaaaggcaggcctagctggaagatggagagagagagaaagagtctttgtggtgtcaattaaacacctgggtgcagcatgtctgaagttcctggactcctcatttgcatgagccaacacatttcctgctgcgtttatgtttcatcatggtttctgatgcttgcagtctgaaaggatctgatgaaaatactgggtgagaacacaaccagtgttcctttctgcaccttcatatctcagagatgtgcacggagtttctttaaaaagggcctttgcgattggaatgttgcagtgaggccaagatccctgtcatgctgcccttctttgccaaatgacaactaactgactcaaagtggagtaaacactgccaacagcttacattcaagagttcaggatgctactcccactggaagacctgtcctggaaagctgccctctgcctgactccccagagtattctggaaggtgcatttttctgaccaacagtcaggattaattactttttcatttgttgaaatatgggggtcagagttatatagacttaagagagagggaagaaaatagtgcatttttgcaactccagcctgaatgggcaatattgcacgttgcacgacttgatttgtttaattcaatgaagctcgacaatccacccaaatgtgtttaaccataggggtttggttaaataaattataatatatggattaaaaaagaagtaaggtagctctgaaatataccatcataaaaatatgtctcatgtatgaagtgttaagtgcactttgcacaatcacacctcaataaagtgaagttttttcaaaaatcaatttgcccaattatatgtataacatatgcccattaaaaaataatacaacagtcctataacttgcaaaagtttgtcatttatatgattaggtgggggaggtgggcaggaaaggaaggcgaaaacaatttgcaattaaagtaactcactctccttggatgattcagtccatgccagctttagttccctatcagagctatttccccttcacaagctatttcccaagacggaaagaagtataagcttgggaggctatgaactagaaacttgggcgtctaagaactagaagctgggatgtctttaggacttcagggaagagttcctccctggcctcacatctctcttgtaagaatgcctcatcctatgggttcagagtctcagttttcatcccagctgccattacctgtgcagcaggcagagcccagggctgattttaaccttgcaaagactgtagacgctccagaagaggagtgctgatcaggatccctgcagtctggctaggacttggggacattgtgaccctgtccagggtcctgactggcaagtgacacaccagaactcagtggctttctgtgtcccctgaggggctgggaaatcaaggcaaccccttcgcatcacacaggagacaagcgtgagactagagggtaccattcctggtcttctctctgcctgaacactctgtagtggcttgaatgctgacccctcagatgatatgtccacatccgaactcctagaacttgtggatgtgaattggccaaagggtctttgcagatacggggctgccctgatagctcagttggtaaagaatccatctacaatgcgggagatcccggttcaattcctgggtcggaaagatcccctggagatgggataggctacccactccagtatcctgttattcccttgtggctcagctagtaaagaatccgcctgcaatgcaggagacctgggttcgatccctggttgggaagatccttggagaaaggaaaggctgcccactccagtattctggtctggagaattccatggactgtacagtttatggggttgaaaagagtcggacacgactagtgactttcactttctttgcagatataattaaattaggtctcaagatgagatcatcctgaattatctggtggggggaggctctaaacccaatgacaagtggcctttcaagagaaagtccaaggaagatgtgacatagaagagatgagagatgactcagaggagaagaatatgtgaagacagaggcaaagactggagtgatggagccatacaaaatgccaccaactaccagacaccagaagaggcaagtaacaggctgccccctagggccggagcatagccctgccagtactgagatttcagacttctggcctccaaaactgtgaaagaataaatttttaaaccacttgttacggcaacccaagaaactcatgcacatttcctgctctcctttctactctactgtgggtatggaccaaatagccctccagacagcatcctacagagttctagaagtgggcagaagtcccctctggggtttctagcttttctacaaccgctcccaggctggggctcagagagaagggtgaggcacaggcagcctcttggcatcactctttcctcctacgaatctgtttttccagctctctaatggctcctctgagaaatggaagctctgcctacattattccgagctgggcaggcatttcaccctgcactgcaccataaattctttctacccgtgccttacagtaaaactccatgttcagtcctccaagtttgcgcctggcatctgcaggaagtcctgggagcagacaactctgctttctctcttatagtaggtgctgctgattctctacccaccttctctttccctgctccatctctttaaaatgacccagttttcattccggagtccatcttgcccttacatcacccacgtgcttcaggtgaggctaaccccaacctcagctctgggggctgctctaactggtggcatggaatctatcccacgtggtccagaaacccaagcctgagtgccagtgcagggcacctctccggccacagaaacaggcatgcaacaccagccatgatgccaagggaaatatactgggacctgctggaaacaggtatttccttgctgttagaaggatccaccagaagggacatgttctccttttcccttggtgtcctggtggtgaatgtctggcaattctgaggggagccaaccccaggatgaagccatcagacagagcatagccaaggggctgctgagttctaggccagagttgctggattaagccagtcctgaagcccaccctgtctctggaatctggttacctgagccaatacatctcattgttgaagccactgtgtcttagacttactgttacctgcatcccaaagcatcttgccaatataccacttgccacagccagttttttaagactactgtcctgttatgggttttgagatcctattttgggagtcaaaagctaactaagcattgttccttattcctcttacattattattgtagcaatttttaatcctccctaaggcagatggatgcctctggctcaataggaggaaaattcacataaggaagcttgagaaaaaatacacgttactgtatttcaaagaaatgatccacattaccctaacattcacacaaaaaacctgggggaagaacttctaaactgtgagcaggagcagctgaagaggacttgggggatatgtgtctccctttctaggctagtatcactgtaatgtttgaatttctagagtaagcatgtattacacttgtaatttaaaatcctgaggattagagtcatctgaggcatccagaattccccaggtaccgtccatggctcagctgtcaatcctgcagaaagtttatttgtggatcagagcaatgacttaagaagaatagtcacaatgtttctttacaatttagactttttgtttcaacagcgtacactgatctagctgagtgcatgttccccgccacaggaaacccttgccaaatctgtgccaagtggtagttaacaggactttggtgtctcctggggtcaggagaggggctgcagctctgagtcagccacagtctgcctcctcccttccaccccaggatctctggcacaaagcgcccatgcctctgtgaggtctgaagggcctccttgcaaactccaatcctgtgtttatgctcctcctgcaagaaggatgccacctcctccttggacagagatgaggaccttcagtatctccagaggggtctccagactctgggggccagagaccacagcccagaccccagtgccccgagagccccctgctctgccccagggtccccgtcactccctaggggttctcttctcggcttagtcctgatgcaatctccaagctcaactggcctgtctctgtcatttcccccaagctgataaagccagaaacctcagagtgagtggaaagagcctctgccctgaccagaagaaaccgcagggctgaccccataccccacagtaagagctggagaggctgggctctgggctcaacgcctggggagaggaggaagaaagatgaaagagctgaagaaaagaccatttgctatcacccgctcacacctgtccaccactctctcttccctggatctttccctgtgcttggtccctggactctgtccctctctaaagcttctggctccaggatcagaaaaagcctcagtgcgagcctcagttctagaatctcaactctcagaaaggctagtatagggggcctcagcactcccctgcccagacatgcctggggtaggtctgggattccttcatgctcacctcctccattaagggctgggcacccactagaaggcatcctgttccccatgggtatccagaaccctcaaatgtcccaaacctcctcatccaccctcacctctgcctggatgggcagtagataccccaggtctcttgccccagtcagacccctatgcaccaggccctgtgctgggcatcaggttcagagatgaggcaggtccctgctgcaggacagtggggggcaggggacagcaggtgggccaatggccagatgaaagcagtcacagtaactgccagctgctcggcccgatgccagctggggacgtgatattgaatggtcacgagccccttccccaacaagcagttcaagttcccagcagtggtctgtacagaagccctcgccagatgcagcatcgctcagagaggtcctcctggttcgcaggatttaacaagtaacccctgctccacggtcctatcgccctctagcattacgtgctcgatttgctcttccagtcacccactcccatcactggagtgtaagctcttggaggcagtatctgggtcattcttacaccccagaccctgggatgctgtctgggcactcacagtgtatttgtgggtactggatgtgcatgaaaggtggttgctggattcttgtccctccttctaccctatcagtcacctagccaaaccacccccaagacctgcagaagctgtctcttctgttctgtcatctctcctcctcgccctccccagactctaaacccagcctccccagcccttccttggtatttcttaatctctaactgctgctgctgctaagtcgcttcagtcatgcccaactctgtgcaaccccatagatagcagcccaccaggctaccccgtccctgggattctccaggcaagaacactggagtgggttgccatttccttctccaatgcgtgaaagtgaaaagtgaaaataaagtcgctcagttgtgtctgactcatagcgaccccatggactgcagcctaccaggctcctccgtccatgggattttccaggcaagagtaatggagtgggttgccatgctttctccgcctaatctgtaagcccagttcaaacgtcacctcctctgtgaagccagctcagatccctttgtgggcacattgcctgtcacatgatcctactgggcgctgcagccacgtgtttatgtgtctgcggcccccgcccccaccaccacctccactgctgaacagaagatcttcagaactgggctggggcccaggtctctgcgtccagggcttctacagagaccagggctgggcataatatcagagctcaggaacgatctgtcagatgaataaaggagtgagtggagaaatgaatggatgagcccccgttagtgagggatacgtgaaggagcaggcggatgcatgaatgagcaagggaagaagctaccgagtgaatgagtcagtgacttggggtgggggggagggggagtgagcctgtgaaggagagagagccgtgagggtttcagtccgctccagcagccctggcagcagccagcccccgccacccctgggcctgagctccgtgccaaccagacctcccgatgcctcctcccagagccagctgccgtcagcaccgctcagcacgcgctcccgatgctggccagcccctgcgctgggccatgaatcagacagggcactgccccagggctcccaggacccggggcagacagacagcctcataaataaacccgatgccctgctgggcagacatgtgttccagcagtgcagtgagctcagggttggctctggagccggggctggcagggcagagcctgatggagaagcctgggagagcctcaggaagagggacctcagggctgggcctggaggagaaagggcacccggggcaggagggctggcagcagccaaggcacagtggcttcgacagacacaggagtgcagggggagggcgtggtggaggtgggaacatggggaacgcagggcctgagtggtggggtcaagaagttgggattggcagagccagggctggggacacagcaggatgtaagcagagtggggcacaaggactgcgggctggcggtgctgtatctcagaaggaaagatgggaggctatggggaacaggtctgtgagtttctagggcgctcagggctgtgtcctgctatagctgttgcataattgagcttctggcttctctccacaaagtcaccatcatcctcccagccctaatactcaccaccagcagcttgaggctttggagcacccaaattagggaggttactttggtgagaacacttccaagtgggtgtttttaagccaagattgttttataatggttcagatcatggggaagatcctggggtttctgaagcaaatcagggaatttcagaatttgacaggaaacctcccagttgaatgggtggaggccaccaattcaaagatgctgagcatcctacagtgcacaggacagcccttcacgacaaagaatgacctagtctaagagatcaatcgtgccatggtgttcaactctttgcaaccccatggactgtaaccctccaggctcctctgtccatgggattctccaaggaagacgactggagcgggttgccattcccttctccagaggatcttcccaactcagggatcaaaccgggtctcctgcatcacaggcagattttttacctctgagccattgggaaagcccagtgtcgaggttaagcaacctgctttcacaggtgggaggactaagacggtgaggatgctagaccaaaaggtggtctccagtaattcacgtgggtcttcatacgtgccaggagctgttctgagaacctacccccattcactcatgtcatctcttcctgctttgaggatgaagattaaagacatatgtgattttcccagggtcacacagctggtgggtggtgaaggcaggattcccacccggattgtctggcttcaaatgctgtgctcttgatcatgacatcccatggtctcccacatcacccagcagctgggacagagctgggcttgggcccagagcccccctctccaggcagatgttccttccactctgctctgggccccaggtccatgtaggagtcttgggctcctccaccaccacagacgtggagcttagcaaccgggactttgatttgtgagggatgcagtgggtgggcaggaggcagatcccagggacagagggcctttgtctgcctgcagatgggcaggggccagttgggtgcaaactcattagacagctgccgaggctgccaaggagacgggagcaattagcgggcttggctgaagccaggaagtggaagccgctctgtgagagctgctgagcctccctgccctccaccaggacccagctccctaggaggcagctgccaagtttatgttcagtttgataatggcagctccaaccatccttacaggttgaacctactatgtgctgggctaggcacattccatatcttgtcttttttcatctataatcacccccacccaccttgggaggctggaatgactaactccattgcatccacttagtcatccttccattcattcgacaggtattcatttattgggtgcctactatgtgccagctctgtgctaggtcccagagatgcagcagccaacacagcagacaaaagtctccactccagtggaccttctgttctggaaggggaagacaggcaacaacaaaaaagaaacaaacaaggtaactgcaacttgtgatcagggctatggaggaagtgaaggggctgatgggaggatgctggggataaaggaatcagggaagctctctctaaggaggtgacagttcacaggggagggacttgggctccgagaggaaaggtgacttttccaaggtcacacagctggaaggtggaggagctagggcttgcctccagccttgacctgggcacctgcctcacaggagcccctgcccctccaccaggccaccatccacagctgtgccacacactggcaccgtatctccaccccttcctcatggcagcctcatgaaattcgtggggttatcacctccatcttacaggtggagaagaggcccagagggggccttcacaaacccagggccctgcaaaggaatgacagacaaggggcttgagcgtcttttgatccccaaacctgtattccttctgccacacctccatccttcctggccaagcacttgacgcgcactgagcgtttagtaggccgataagaaacagatggatgcatggactatggggccttgggcatcatctcctttcagtgcttccatttctccattagagaaggcgagagggtccagaccagcttcaaaatgcccaagttcattctactctgttgacattccttgaggagcgtggtcccctatggagaaaaagatgaaagggactctgcctcccgcagactattctgggcggagcaaactgcaggcagaagcatggaggtgggaaaggaaatggcgaggagtcagcagacatgtttaggacgcggagagccacctggaactcatatctaagtgtccctttccttttcctgcattcttaccacctgtcacctgcatagggtcttaggccaccagagcttcatctcctctcaattccagctcttgcttgagtcccagagagtctcccagaggaggggctgaagcagatcccaaatatatctgtgccaccaactgtgcacagtgtgatcttggtcaggcagctggtcccctccctcagccttggtcttcctatcgattaactggggagacagtgatcagagcaagtcggtagcacaataaaaggtgaggtttatgagcacattctccatgtcaggcagtcatcccttgagacaggcaattttgttatccctgatgtacagataagagatctgaggcttagggaggtgaagtcactggcccagggccacacactaggaaatggctcccccgggggattcacgcccaggtccatctgatgccagagctctgctcataacaaaaagctcatatgaagcaatgccctgccctttgacccacgcaacactcaacccccaggactttactcgtaggaaataatccaagagagccaaaaacctgttcacagcgggcctatttacagtatggcagatcactggaagaaatctgcatgcccaacgacagggctctgttcactttagaaattaggcagcttcagatggactgtggcttactgagcaccagctcttgccagttgctccactgtaacccccaccctaaccctgcaaagtggatgttgctttctgcatcctgggtgaggcctccaagttcagagtgtgaaggattggctgagggctcacagccagtgttgggccagggcatgagtggtgtggccaggcctgttcacagccacaccccaggtagctctgttctacaagaaaggaagctaaggcaagtaagtgacccagtaccacacggctgataagcagagaactggagtttgaccacaggaactgggactgcatactctgggaccacttccccacactgccacctactgactgggaaactgcaggcgagtcatttaccattcccaagcctcctgggctcctcatctgtaaaatgagaataagattgtctgttgcgcatggtgtcaccatgtaagcagtggtaaagatagcaatggcaacactggtaatactgctattcacagtcgataccaccgggacagcgttctgccgtgaaaggaaaccttgcctgaacgttagaaggactggctgcaaacctcagctaggacacgtctcaactctctctgggcctcagtttctccatctgtaaaatgggggagggcacacttgagcatgtctccggctctggtggtctctgagcccaggaacactgctatctcgggttttccctgggactctgcctgctgacccctcatcacacactggtctgggggagcgggggcgggacgcagtgggtctgggcttgaggacacatgtactggaggaggacaaggggcccttggacagggaaatggaggttaagtcaggaagccccaacactcagcccctcaacacacagcccctgctcctggcctaagggccactcaggcagcatctgctctaggtcctttgtacctctgcatgggacctgcctctgccccacggcctcagtctctcccctccctgccagcccctcaaggagatgctgaaccttggtgaagagaaagcagaggaaggcaaggaaggaaaggctgaggggaccaggagaagaggagaaagcaccctgagaaggaggggtgaagagcatggttttacataatggatggtaggggtgggatgagaacgaggcttgggacggggtagggaggaagaagaagaggtcaacagaggggctgagagggtctctgacatttttcagagttccctttaccaaccctggtgaccttcgggtgccctctctttatgtcctgctgactggatacactgggagccaggcctttcacagaggtcatgccagccctgagggcaggcctcccacatggctccagccccataggcggccacacagaagggccaagggatgtttgcgggacaaaggacttggttcactctcccaaaggctctgaactgagaagaatgtagacatcatccaatccacctttcctcacctgccgccccaccccacccccaccaagggaggaaggactttctcagggctccaaggtggggatgtcgatgtcagggccagaaccggaacccagtgtcctgtgtcttgggcctttctccagcccagccctggagggtcccagcagcaggaagaatccctgcctctggttctggcttaataaccagccacgaggcggggctcagggcctgcggctcagctgccagtctccccaggttgcaagagcattaaatggcctcagtgatgcacagctttgactcctgagcaggcgaggctggtggcagagaatacactgatgtgacatctgggggctcctgggagcctgagccccggacaaacctccaccagcgtctgaggaacctcaggctctgcagagtcagtggcacagaggcccgcagcatccttggaattgaggcctggtgtggcagaaagaggagaggccagatgacccaccgagataccccagaggcagcaaagctgagagacacagccagctgcaggttaagagctttcaaaaactttcagctacagccaaagacaggagatcagtttgtaaacagacaacaaaatcccacaacaccctcagatatgtcctaactcatctctctgatgggctcagagctggagctggcctgctcagattcctcatccctttccaagaaaggggcagcctagccttggacttggagaggccaatgccttcctcaggccagttcttctattccctccccatccaaatgcatcaacaaatcccctctgggtttattttcttccctccttccctgcaggactccagcctcatcccatcagtggtgctcacccttcctcccaaaccctccctggctccccatgtcaacaaggtggcattcagactacttgacttgacattcaagtgtgatctgctctctgacctcaaaccctactgctcccctctgccccaaccatgactctcagtcttgggatgttcttgccacaggaactgcacattccaatctggtagtgggcatgcttttcctctgaatgcaggtgacccatgcgtctgccccaatcagtggggccatggtagaggggactctcaaccctaccacttcctggaagtgtgaccttggggaagggagtctcacttttctcatctgcaaaatgggaatgctgatcccttcacgggattcaaaggtctgggcacagtgcagatcacagaactattattagctattatttagctattattggattccctgatagctcagttgataaagaatccacctgcaatgcaggagaccccagtacaattcctggatcaggaagatctgctggagaagggataagctacccactccagtattcttgggcttcccttatgactcagctggtaaagaatcctcctgcaacgcgggagacctgggtttgatccctagttgggaagatcccctggaaaaggctacccactccagtattctggcctggagaattccacggactgtatagtccatgggtcgcaaagagtcagacatgactgagcgactttcactttcactttagctattatttatcaggatcagtgctgttattacttcgtgcggtcccacacagcaaacatcctaagcaccgggccactggcaggccccaagtctgtcaaactaacctcacatgataatattagaaacactcgcctccatctcaacttgcatatgtgaaactgaggcccaggggcccaaagcccagctaacagcagaacagaccagaagccacatctcctgatttccaagccagaactctttccctacaagctgccactactaaaagccgagttcagacgccaaactttaattgtgatagtctcagtttatacaagaagaaaaacctttgctccatataagaatctttattatttattctcacttttaatgccccaccttgaacattcctatgtaccttcagagaacacccccctcctcctcctcctaggcaaagctcactcctccagctgctctttctccccacctcttttctctctccatccctggggaagcctttatctgaccttccctggcggagccaaagggcaaatgctggcttgcctttttgctgctcagctaaaaagctgactgccttttctcactttctggattgtgttgttgttcttagcctcaagggtctaccctgtaagagaaaaccagaacctccctctccaaagcctttatctattcccagttcctcccatcttaaaaaacaaccagggaccagacaaagcaaaccttcttctaccctcttctccttcagtctggcccggtttcttggtggtgacctgttatctccaggctccatctccttggcttcatctcctactcgccaacccatggggttgcctctgctgtgtcttctgttcaggtctgcagcgactccatttcccccaggtgtgctgggctctgggtagccttcaatctgcctgatctgtctgcctcagtttcctctctgagcgctgtctcctgggggttgtctgacactgtctccccacagccctgccagtaacttctcaatgccctttgttgggctcctcctccatccaagccttgacattctgtcttgggtcctcttgtcttcccatgctccttcccttggcctccttataggctgaatttccatctctagccaatgattgctagagtccacctccagcccaaacttttctcctgaggcccaggcctgggcaccctgttgcctctactggatgtctcttgtctttttaatgattatttatttgtttatttggctgcactgggtcctag

SEQ ID NO: 47 - DNA, 83049 bp, Bos taurus
  unsure (51703)..(51754): sequence is unknown
  misc_feature (51704)..(51753): n is a, c, g, or t
  unsure (57347)..(57398): sequence is unknown
  misc_feature (57348)..(57397): n is a, c, g, or t
gcctctctggtcattctgctcccagctgccaggaggtcatgcccttggcctcccttcacctgacagctccaccccgcagttttttatctacatcctcttgcatgcccgactgtcatccatttgctgagtgctgagctgtttgaaagcacaaatgctgggctttctggtcccggtgcagcttggcatagtggggtccagagaagcatggttgtaccagtgacctgagtcagctcatgtgtccagctctcttagttagtagttgagtggatgctgacatgagcgtagtgttgggccagcaggacccaaaccctcaggatcctgccaggtgggcgagatgttagcggagctctccccagagtcctgattgctgccaacttcagagatgcccaaactaggtctgtgtcctgttagagctgaccccgctggtggggctgccccagcagaagtcagaccaggaggctggtatttcagagctctactctcctccccagctgggagcaccaggggttctacaagcaccttctctggacatgagtggctgggaagaggccctctccgcaggctgaggtcagcttagccaaaccttccaagggaacagggcctgccacctgccagatgctattgtgccaggcatcagcagcgtggccacagtggcaggtgtgtatgtgaactgaccgtgcccagtgctgctggccccgccagcatggctgctgtattccagaataatagatgtctccatgaatgcgctgagtggctacagttattaatatttgagcccttgatatgtgccaggcttgtgtttcctcctcctagcaaaccttatgagatgagactgtcatattcatttgacaaagatggagacagaggcccagcagagtgacttaacttgctcttggtgaagccaggactgaatactaaccaaaaagaaaaagaaagggaaggcctgtcttgtttgctgtggtttgatgccagccttactacttactttgcctgggcaaggtaaggtgaactgtctcatcttagttccctgtctgtaacatgaagataggaatagtgcctaccgggcaggattatttgtggattaggtgaattaacgcacatgcaggccctagagctgaaccttaacatggtagatacgaagtcatttttgctgtttacaaagtgctcccataccctcaacgatcttggccgtcaggcggggtttgtggcacagagcagcgtggggtgcggctgtaacctcgggcctcctgtgtctgtccctcaggaaccagtgatgacccattccaggactcggaagggcgagagggcgcagaggccgtggcagagcaccagttttcagacctggacgactcggactcggactcggacctggacgaagacgaggatgaggacgaggaggagagccaggacgagccatcaggcccgtcctcggaggcgcccccacctggcccgccagccacgctgcccgcagactcctcacccgttcagggccctcagcccacagaggccacccggggcagctcggtctcagaagccgagcgctcggcacccagcagctgctccacatccagccaaagcatcctgtgcctcccccggctggcaccggccccccggggcccagtggagaaggacacaggctcggccctgagctcccaggccctgtccccaaggaggccgtggtccccaagcaaagaagcaggcagccacctaccactcaccccaaaacactcactaaccaaaagctactcgtctccccagcgacattcaccggcccgagagccactggcctcagccccgagtccgcctggctcccagacgggccctctcccctgcgggtccccgagactcgagctgtcgcctcttgccctccaccccctgggaagggaactgccacttcgagcgcgcctgccccccgaacgcaagggcgctgcagacccaggcccccccagacactcgcccaccaggagatggtctccaggccaggccgagtcaccaccacggtcagcgctgccagggaagtgggccttggcagggccgggcagccccttggcggccgagcgtggcccaggctcagggctggccccccgggctctctacccgcccgcgcctctacctcacaagcttctcggcagaagcccagcggagacctgcacctccacatgggtgagttcctgtcccccaagtggctgatgggtggggggccgcgagctcacacctccctgagcgtcacacccagagctggacccctgccagttcagcggttaccaataaggcgtgcattgggcaccacttacacaggcactgtgctgggtgcctgaaaccagtcagctgtgtgtcagaagcagcggagcatggactgtggagctggactaaaagaaagtgaaagtggaagtgttagttgcacagtcatgtccaactctatggactgtagccggccagactcctctgtccatggaattcttcaggcaaaaatactgaaatgggttgccatgcccttctccagaggatcttcccatccctgggatcgaatccaggtcttcagcatcacaggcagattctttaccatctgagccaccagggactacctgatagtttttaaattctggactacccagaattaaatccgggttctgtcacttacgagccgtgtggctttagatgtggtataaacactcatgccatctcctcccaccccatttccacgtattctttgagcagatggcagagcccaacccaaatctccacatctccaacatgactgccaccagcaccctccgagtcacttgagccagctccttcccatcttcccatcagcaccgtcactgtcacatcatcagtgccatctgccatcagtacactccagccaccccataggcttgatcaccgtggtcacaacatcactgccaccaccacggtcacgatccccagcactgacacgttatcatcatcggcttacttttcctctcccaacaccttttctgtcactggagtgtcacgacccaacatctctgctcaccgccagcagtgtcagcaccatcactcaagcgattcaagctccaggagtagtaccatccaggaatcttaacttggtttttaatttggggctcaagttaaaattcctggtggtgaaaaagtgaaagtcgctcagttgtatccgactctttgtgactccatggactgtgtagaattctccaggccagaatactggagtgggtagcctttcccttcaggggatcttcccgacccagggatcgaacccaggtctcccgcattgcaggcggattcttggtggtgggaggaggttaagagcctggggtgggaactcatgttcaagggtaaagttgggtcagtattgtctgaggaacaagagaggcagcagaagcaagagagagggccagcgcacagaagccaacagaaggggcagctccattctctgaaaacgaacgcgctggccagaagcgtggggaccttggttcctgagtgtgcctatggccactatagggctggagatggcccattccagagagggcacccacccagggtgccaccgttggcaagggttgggactcaatggtggcccagctcagctaggacctgctctgtgatctcgccaagccccctcctcactctagtcctcagggtctccaggtgcccagcaggtaaccctcgccttcctctgtcttcttttctgaccctagcagaaggccgagtcgccaagtccgtcctgttcacctgctcccgctcatcctctcttctcccgacccttctcggccccccatgacttccacggccacagcccggcccggacggagaacatcttcagccacctgcctctgcactcccagcgcttgacccgcgccccgtgccccctgattcccatcggcggaatccagatggtgcaggcccggccgggggcccaccctatcctgctccccgggcccagcgcggcctgggtcagcggtttctcggggggcggaagcgacctgacagggtcccgggaggcccaggagcgaggccgctggagccccaccgagagctcgtcagcctccgtgtcccccgtggccaaggtctccaaattcacactctcctcggagctggaggccagggactaccccacggagagggggaggacgagagggggcctgggcagacctcccgactgggagccccgtgcggcccaagtgcccacagagcccacgccgacgcacagcccccgcacccccccagagacctcaccccgggcacccccaggccaccgggcagagtcccggagcccccacctggagtcaccgcgggtgccggccaaccctgcggcctccgccaccccgccgctggaccgcagcagttccgtgggctgcctggccgagaccgctgctcgcttcccagcccggaggaggaacctctctggggaacccaggaccagtcagggctccccccagccctcgggaagtggggggtccgggacacctccacaccagcccgaggagcgggggccccggagcacttagcctctccctgaccacttcagcatctggtttctggtgtttggcaacagacgtttccagccgacttcctcgagtcatcttgctgtcacgggctccctgtcccatctgttgatctttccaagcagcttctgctcagcccccatctgtcttatcttcccacctcgtatgcagttacctgtgcctttttctatgaccttttgttgcttgaaaagaaacaacacacacacagacataaaaaaaaaaaatcccacgaggagactgaggctgtgaatatttagatgggacctcaccctgggccactgcgatcagcagccccccacaaagctggcaagaggcagtcagttgctgaaagaaaggggatgcactgagggagagacagagaaaaaaaaagaaacttttaaaaatatataagtaaatgtaaaagcaagcactcctatgtacagagtttatggttcctatttattgctgcttcatcccaccccagctagtggcctcccctggctgctagcagaagggtcagcggcccaaggcagagggacaggctgggagactccatgggcaggcccagaaaactccaactttccttttccaaagataaggtaaattttcctaggatttcaacacaaactgtttggagcaggtagaaggtagttgctggttgggtccccagggctcgcagacaccctggtggtctgactcgtgaccccattctggcatttgactcatagacaaatccccccaccccggcacctctactctgcactctgccctcaacctttggactggggaaggagccctgaccacccatctcccggttcctgagcacctgacctcggccttgctctcagggccccagccattgctgcgcctttgttctagtaactacccacaaggctgaagggacaaggcctaacccctgggggtcaagatccaaggtgcattgccttgccattcccaaggccaggcttgggcttcatttcacatttggtccctggggtacaaagggctctatttcctccatgactgggcttttccggtacttagcactggaagtttccaaggactcatttctggacctctttgcagcaggaccagtcctcctattggcgtgtcacacactgtcaggcctctactatccccaggaagtacccagaaccatgactggtgggaactgcccaggcctcctattggttggcttaaatctcttttaaaaaataaaattatatatgtgtatatatacatatatatacatacatatatatatatatatatatatatatatatatatatatatatatatatatagaaagagaatggtgtttgatatttcccctagcctcctattgtccgaggtcatttcaattcttctccaaagcaatcaagaataactagtgcctcatttctcatccccatctcctcctttaagaagctgccctgtgttttctggggcaaaagcctgctttgtaaaaaataataataaatagtaataacatgactagaaattaaaatcccaagttgaaatatagaacttgaactctagcatgtttacccagccctgggatatgtggggttttccccaacctccagaaattcttttcttttgtctctaccagggggagaaagcacaaggaccgtggtcacagcccagccaggctaggtgctaatgccgcagagcagggacctccttggccggtcctcattcctcagccaggctgtatgaatcctgtggccagagggggctcctgggctgttgaagttgcttagacaggacaccataaggtgcagagggctacaccatgcagaggcacctctgtgggctcctacccttgggcgtaattccctcttccaccagttcaggacttttccttccttggactctgctgccaggacaaactagccaggccacctggttcatttccctctggctaagacaaaaaggggacaatagggatgggcttccctgggagggggtggctgggccccagggtgctgaggctagggttaaccagcacttcctggctgcctgacccagggtctgaagctcttggtccccctggaagaaggctaacaagcccagccttggctatgctggcacttgtgggtcctggcagaaagctggaaggagccccggaccccagtcacagccttggccagaggctgggtttttcctcacccttgctttccaaccttaccccagggcaaaggtgagggacatgggaaggtggctgcctaaggactggagacttcaagggccgaggcctgggagctgaataaagggcattgcttcagcccaggcttgaaatcttcctgggcaagatcttccagctcccaacctacagagcagcaaacagggggctctgctagagtagcccctgaccttgggggtagccaggcccctcctccaagccctgccccacagctctccccggggcatcattcctctggtactcagacagcccaactactaaggtttccttcctggagccctagtcatggctggtggtggtcagcaggggagagtcaggcacaggcagaggggatgggggccaggagtcaccagagacccatttctcaatgacagacacaatgtgcaagcaatctggccaaaaggttgttgccctgcacaggcatccagagaaatggacttgatgccacccgcctgggctgtatgtcactgggcatggctctcaccctctctgcctcactcaactcctgctcccccaaacacagagctcccagcccgcacgcacacctgcatgataagggaaagactctcacatcacaccctcctcctgccctgctcccagccactttcacatttccagcctgcctgtgacactgttgtccctgttaagggacacagtggagaaagcagtgcccattgttggcacagacacctgtgcctgttctgctgaaatgtgcaggacagtcattcctgggtacaggctggctctggtcctcgggtgttggcagccttgcgggctggagaccaacttgctggggtttcagagccagctcttgtcatggggattccaagccagccggcccccagttctaccctccaggatgcccttcaccctcaggacaagctcagggtcattctgggcactaacctgttcctctccaaggcaccttttacaagcctacttcccctgccccaccacccaccaaggccccgactactaagaccctccaggaagtcaacagcagcgaactgcccactctcccacctccatcacctccaacttccagacccagcagtcccttcacctctctctgtgttaacaagtctgaaagatttaatttctgggtccaggtagcccctgctccatcctcacccaacccttttgaataagaataatcaagataactaagctgaattgctttctagtcctttctccagacaaaacctcttcaaaataaaagtcctgcctggacagtcgtccttggagacagatctgcagcactgaccaaggggagaaagttcccaaagacctgttccaccaattctgctcctgagtcgtgaatcctgtctgctttccatcagaaaactgcttcggcacttatgatcactttactaagcctagtgttaaaaaaggaagagaaaagaaacagaaaaaagaaatgtataggcaaatgtaagataacacgctctctgtaagatagaaatttgccttttttttttttttccctaaaaggtgtatgtattctgtatgtgaaattgtctgtagagagtttctatgttcttaaatggcaatacattccaaaaatcgtactgtagatatgtacagcaaccacactgggatggggtagttttgcctgtaactttatttaaactccagtttctctacttgcatcttgcaatgtcggtatggtatatatatcagtgcaaaaggaaaaaacaaaaactcccacaggtctaaagcacagagtctgatgtacaaaaagaaaatactgctcagtattgatgtgtgacctttgttgtaaattacatctgtactgtgaatgagaagtttttacaagtataataattgcctttattatagctctggctgagtgttcagcctgaggatattttttaaaaaaaaaacagcacgttggaataaatttgaaaatcccaacagaggcctgcttgcccggctcatgatttttcttagggctgtagaatgtcagagctggaaggacactccgagtcccaagtgctttttctgctacagagaaatcagggccagggaaggcgagtggccaggccatagtcacatagcctgggattccaagggcccggcccttccaggcttggcaggaggcacgggtacatggccatgtggtttggggtctgtattcatttcctagggctgctggatcaaatgaacaaactaaatggcttaaaacagcagaaatgtgttctctcacatttctggaggccagaggtctgaaaccaaggttcctggggaggctctgagggaggatctgggccagacctctgtcctcacttctgggggctgcaggccatccttggcctttggtttgtcatcacagcactctcgtctctgcctctgccttcgttctcgctgccttctctgtgtgctgtctaagggtcctcatcactggacttggggaacacgctcattcaatatgatctcatctctagatctttaactgaagtatatctgcgaacactccttttctgaaggaggtcacacttacatgttccagggtttaggacatggacttacctttgaggggccaccactgagcccctcaaggtaagacctggaatctgatcgtgacagttattcactgcctgtgtgacactgcgcaagttacacaacctctctgggcttctgtttcctgttctgtgaagtggagggtttcctgtgaggattaaatgagagagtatatgtgctaagtgctaaatcacttcagtcgtttccgacttggcgacactgtggactgtatagctcaccaggctccaccatccatggggatcccccaggcaagaatactggagtgggttgctatgccgtcctccaggggatctttctgacccagggatcaaacctgcggctcttatgtctctggcattggcaggcaggttctttaccactagcaccacctgggaagcatgcatacagcatggttaacagaaccttgaatatggtacggcgtcaacaagtgtcctctgagcagacctcacacagggtgctgtggttacaaggatgaaaaagtcaggtataggtccccaccttttgtatgcaacaatgacttgctctgcaccaggcagggactaatcatcagatacaacagtgagcaaatcagacagccctgccttcagagaactttcattctaatgggagaggccgtccttaagcaaataacgacatcatcaattcctcagtcccagtggccgtagttgttgctacaggagagaacaaagctctcacacagagtaagtcctaaaactcctgtgggctctggagcctgggtgggttgtggggagggctgcaggtggaggtggagtggaggggaagccatgataggagcagacagaagaagaggtacgtggacaaatcaagagaggccttcggggtaaaatgctggacacaagtttagcactaagaacctaagagggcctgcttgtttcagcggcaggaggatcattgctgacttggggaaaagccggcctgttccagcgcccagtctgcaggcccttcgtaaacactgccagtgctgaatggattgtggaggcagggggtggaggctggagagtgaggagaagagggaagtggggacggcagacccagacatcctccccaggacctgaggggagggcaggggagagctgggcagcagctggagggcagcaaggcgtccagggaagaacggagatgggaatgaggtggtgagaccccagcctgcttcattaggaggagatgtaagtaccagatgcagaaatttcccccagtgtgacccaagggaagaggtgcaagtgataacagtgaccggaagttgagaacatttccgccacggaattttctctgtcacctgctgagaagggaagaggaagctccagtatggggtagggggtgcggagcgggggtggtgtggactaaagacttgagaaagaaaaggttggaaattgtctttgttcattattccagaggcaggacagttgtggatgaaggcagtgtggaccacacaggcgtgggtgctgggcacaagagatgaaaaggctgggaagcgagtatccatggtgccagtgacctgaatgttcatctctgctgaccacagggctggactggaaacccaggctgtgagctaggcttcataatccaggatatgggctgtcacgctgcagaaacaagcaagccagaaactccagaactgaaaacaatgaaagttgaactttcccctctgccatctgtcccatgtgggtcagcagctgaagtgtactcatcctcatcatttggagacctaggctgctggacgctttatcccgtgttcctgtgacctcagaggcagaagaaaggagagagctgtgaaatgttgcattgacagctaaatgctctacatgggaaaagacatctctcctttcaaatttcacctgccaaagcagatcatattgctgtgcctagtgacagagatgaggaatatgtgtgacagtcacacaaggatacgacttcccagtgtcagaaacacccaagggctgagcagatgtcaatgatgggatgggggcagggacagggcctcatggcatcggcctcaaaggtgctgggtttttacagggagtgaaaaaaataatggtgtgcaaggaggcctggaagaaaatggcccctggcattttgatcatggggtgtggaaggcaaggagcagctgtctgggagcgagtccttggggagatcctgaatttcagtcgagaccagtgggaaagtggaatcccaaaaaggcccaggagaagaagagcacagaatggagccaagtccggcctccagcattttacaagccctatttatagtccttgggcttccttggtggctcagtgaaggaagccacctgccaaggcaggagagataggttcaattcctgggtcgggaagaacacttggaataggaaatggcaacccactccagtattcttgcctaggaaatcccatggccagaggagcctggagggctacagtccatggggtctcgaaagagtcagacatgactgactaaaaacaacaatgtatagttcccaacgacaacccagggagatgagacttacggtccccatttttagagaagaaagtggaagttccaaagagcccccaccaaggacttcctgctaagactctgtgctcccaatgcaaggggtttcagatttgacccctgttcagggaactagatctcacacgccccagctgagagtctccacgccacaacgaaagattccacatgtcataactaaagatccgacaagctgcaaagaagatccaggatcctgagcagatcctggaaagatccactttccaagttacaacaaagactcggtgcagccaaatgaatacaaataaagaaagaaagaaatattaaaaacaaaaggacccccaccagccaaagatgcagggctggttagaggctgtgtgagactgactctagcctgactctggtgcagcgcctctgggagccccaagttcctccctctcatctcctccctgtgctctggccccaggggagccctggatctcagactcttcacctccttctccccaggaacccaggggaagaggcaggcccaggccaaggcttcttcccagcagctgcctggcttctcgcagccatccaggatagccccgtgtgtccccgtgtctgaggctgaaggcgcagggatggaccatcagactcaggggctgggattccagtgctcgagagcatgccaagtgcatgcaaactctctgaagaacctgactccccagcctgctgctggcacccaggcccacctgtcactcacaccaagcctcccatggcctctcgtattcacgaggcaatttcccttttggagtgagggagatagggcacctacttccacttcacagaagaatagatcccaagattgcaccctggcaagtggcagggccaccgacccgggtcacacctgacccagaacctcaggaaggcttgggctgagccttgccactgcccatcagggctgggccttctccctaggcctagaccctctctgggcttaagacctagagaccatgcttactcctagagattcccagggacaaaccacggctggcaggatggcctcagaaggcaggccagcctgagatgggcatgagcagggagaaacaggaagcaaaaagagtcaaataaggatgggggcgactgaggagggagcagcccagggctgccctgcgtgggactcatcactgccatctggcccggggagagacttatcacctcgtcactttgtagaggaggaaggctggggcttggacaggtgatgctgctcataaggccacagtggtcaggggcagagcagagacttaaaaccaggcccacacattcagggagtggttgggactatggaaagggaatctgggcctcttggctacctcttagtcctgaaatctgggttgggggaccccagcagacatatcctttaattccatccagcctcagccactttacagagacccagctaccaacctcccccttttataaatgagaaagttgatgtccagagccgggaagagcttggcccaaggccagagctaggattcccgaaccctcagcagagccacctggaccactccgcccacccctccttaccccaggcccaggttcacctgcccagatctgcctttttaggaaaggaaaggagcagccctggtgggggcaggcgggtgggcaggcagccacgctaatccactagctcccggaggctctggttaccgtggtttggggcccgggcaaccctggctgggagtgccagcccagccaatcggtgctgccgctgagctactctgccagagccatacaaggctttgctgcagccctatcttgagccaccacaggacagccccagcgtcggcagccgccccgcccgggagcctgccagcccggcacgtcctcggactctgcctaatccaacctggaagcaggcagggctgcagcgcacgtgcaccgggcccagggttccccaaggccaggaaggtggcactgccagggcagaggccagaatcggggcaaagacctagccgggcatcggagatcctggctggggtcagggatgagctcaggtctggtccaggctgagctgtatctctctgtaagatgctcttctgttcccatcacccctttggcctgactgactgcttatccttccccattcaccgtggagacggggctcagcacagtgagtatctggtcccttctgaggtcttctcagggtccaagtcccaactactctaacccatccagggtctgaggctgcatgcacctctcagaattggggcgtccatttctaagtgcacgttgtgagcatcaggcacatacagccccccctgtggtctttgggggtccactgtcactgccatggatctgggccttggctgtggaagcaggtggggaccggtgacccctgcccagtggagcccatcccatctgtcagtgcataacacctgagtgttatgaattcacaggacccccgaggagtggaaactattggccctgtttggcaagcaaggaaatcaagtcacagagaagttatttgtctgaaactggagtgtcaggattcagccccagagtggtctgactctagatctctagaaatttccgatcctggagggaccaggggctgccatttacactgaagtgtgaatggaggcgagaaagtcattgtctgagataagaggaccctttctttaaaatatgtatctttttattctttcgttgtttttggctgtgttgggtctccgttgctgtgcacaggattcctctggttgtgacgactggggctactcttggttgtggtgcatgggcttctaacagcggcggcttctcttgcggagcacaggctctagagcgcacgagtctcagtagctgtggtgcacgggcccagttgccctgcagcatatagaatcttcctggaccagggattgaacccgtgccccctgcactggcaggcagattgccaaccgctggactatcagggaagtccaagggtgccctttgttcctgaattgggtagggccaggcccccagtgcacggccattgcccaggccctggtcaggttgcccacgcatgcagcggcccctgcagagcgtcccaggccaccactgtcaattagatttgtcacggaagttcactgggttccaacatccttgtgtgtcctacgtgggccaagttgagctcaaagccaagactgcggtactccccagggccacccggcaggtgagagaaacgtgccgacctggggggtggcaggccaggctggcattaggctctgtttgctcacccaagaaaggaagagataaatatagacacaggattactcagacacagcctgggaaaaccggctccgaacctcgacttcagccctggcccggtctcaccttcacccgcctgccccctcggtgtctgctgccaggcctgccccacctgttcccaggacgccccacctgcaaacttcaggacagccgttcctgcctgccttctgggggcaggacagaaactgaggcccagagagagcagggcacccgcctcacatcccacagcaggttaggagctggtgacgcgagggctgcactgcgggagtcagtttatcaggtccaggcaatgcaccagcccagattcggtttccatatttgtgagatggggacctggtacccccggccctcaacgccctggagcctgcgtgtagggtagagttggagaccacgcagcagaaaggggatgaagctggaggctcaagcacaggaaatgctggcccaagccgcatgtgtagggcttcagcactgggactctggagccaaatggcctgggcttaatatccccctccaccattttcagccaagagatttggggcaagtttcttaacatggtgccacaatttcctcatctctaatataagaataataagaattgttattctatacaataaataatatgtacagtattatttgggcttccctgggcggctcaatggtaaagaatccacctgccaatacaggagacatgggttcgattcccgagtcaggaagattacctggagaaggaaatggcaacccacgccagtattcatgtgcttagtcactcagttgtgtctgactctttgcaacccttttgactgtagtccaccaggctcctctgtccatggaaatcgggggcaagcatactggagtgggttgccatttcctcctccaggggatcttcctgacccagggattgtatcacatctcttgtgtttcctgcattggcaggtgggttctttagcactactgagcaaccagggaagcccaaataatactgtctataatactaaaatcccatggacagaggagcctagtggactatagtcgatggagtcgcaaagaattgaacacaagtatgatgttatatatatgtacatgtatatgtgtacgtatatacacgtacatatatgcacatacacataggtattgatacatatatacatgtagacatgtgtgtctacccacatttgggtctcgcaggaggtgctagtggtaaagaatcctcctgtcaatgcaggagacataagagatgcgggttcaggtccctgggtggggaagatcctctggaggaggggatgccaacccactccagtattcttgctggagaatcccatggacaaaggagcctggtgggctatagtccatagggtcataaggagtcaggcatgactgaagtgacttaccatgcatataggcaccggtattcttgggtgggaaatcccatggacagtggagcctggcgagctacagtctatagggtcacaaagagttggaaatgacttagtgactgagcacgcaggcacatatatgtagatgtattatttacatatcattacaataataatagcctaataacaataccaacctctcagagtgttggggtggattaggtgagattagtacaaagcacttacccagggcctgacacagagcaatgactccacatgcatgtttatgatgatgcagccactggggcaggtgggggcctgggcgcaagaggcgtgggtgggcgtctccaagtctcctgccctccaagggaagagctcagccctgagctctatggtgcgttggtctctcctgcactgtgacccttgcagcagctccctgctctgcctgaaagcttcaagagtcaggcagacatggatttgaaggttggctcccacttacgggcttcccttgtggctcagctagtaaagaatttgcctgcaacgtgggagacatgggttcgatccctgggttgggaagaccccctggagaaggaaaaggctacccactccaggattctggcctggggaatttcatagactgtaagagtcggacaaaactgagtgactttcactttgccaccacttacagactgtgtgaccttgggcaagtaactggccctctccaagcctcaaaatccacttttatccctcttgggattggtgtgagggttaaatgggggaacaagtgcgaaactctcagttcagccaggcaagtggactctctatgcttgagctcatcctgagccccatctcttgtttcctccagtttctctcagtggctatgagctgagcccaggacaggtgcatgaccctctgggtgcatgaccctcacacatgcaagggttctcagttatgggaaacactcaccagcccctacatcatgcatgagctcatgttcctgcccttgggtccctggagccatcagagatccgcaagttccccctgtactcttcatgcactcgtgcatatccacacaggctccctctccacattcctgcacacgcacatgcgtgcatctatggacacacagggcacagctgtgtgcgagctcggagaggctggtgcccacaggtgtgtccctgcacacctcaccagcacgcacgctgccacagtcaggggtgttctagccaggcctgccctagccaggcctgcccctgaggtggccgtcttcacagcagaggaatgcagacagctggggatgctctgccagcggacgtgagggagaggcccaggggaaaccacacgggcaggaatccaggcaggcgttccaggccaaggtggagtcctaaggtgtcaggaagtgcggggggggggggcatgtgcagactctaacttgctccagtctcctctctcatcaccctgtgtcctcagcctctaggacttggaggccaaagggttgcacagaccaccgttctccatccaagacagccagccagctctacctgcacagccttgctgcctagcagagcactgggtctctgggctgcagtggcctggtctcagctagaagggatcattcttggcatagggtctttcttcctcactggggaagaatctatgatcacagaagaatctatggggagaatctatggggagaatctatgacccagaagaatctatgactgcagagatcagcagaagaggagtgggttttttttttcctcatttttattaacatatagttggtttacaatgttgtattagttttcctgtatagcaaagtgaatcagcaatatgtatacatatatcccccctttttcggatttccttcccatttaggtcaccacagcacactgagtagagctccctactccctactactaataagtagattctcattcagttcagttcagttcagtcactcagtcatgtctgactctttgcgaccccatggactgcagcatgctaggcctccctgtccatcaccaactcctggagttcactcaaactcatgttcattgagtcagtgataccatccaaccatctaatcctctgtcatccccttctcctcctgccttcaatctttcccaacatcagggtcttttccaacgagtcatttcttcgcatcaggtggccaaagtattggagtctcagcttcaacatcagtccctccaatgaacactcaggactgatctcctttaggatggactggattggatctccttgtagtccaagggactctcaagagtcttctccaacaccacagttcaaaagcatcaattctttggcgctcagccttcttcacagtccaactctcacatccatacctgactactggaaaaaccatagcgttgactagacagacctttgttagcaaagcaatggctctgcttttcaatatgctatctaggttggtcataactttccttccaagaagtaagcatcttttaatttcatggctgccagtcaccatctgcagtgattttggagcccagaagaataaagtctgacagtgtttccactgtttccccatctatttgccatgaactgatgggactggatgccatgatcttagttttctgaatgttgagctttaagccaactttttccactttcctctttcactttcatcgagaggctctttagttcttcttcactttctgccataagggtggcgtcatctgcatatctgatttctcccagcaatcttgattccagcttgtgcttcttccagcccagtgtttctcatgatgtactctgcattagttatctattttatacatagtatcaatagtgtatatacatcaatcccaatctcccaattcatcccccactctttccccttttggtgtccatacatttgttctctacatctgtgtctctatttccgttttatagatgagatcacctacaccattattttcagattccacacatatatgttaatatgcaatatttgtttttctgacttcactctgtatgacagcctctaggcccatactgtcatcattggctcaagtcagagatgacggagacaatgtggaagtcactagaactcttcaggcaggactcatactgactcagcagccagtgtatgttaggtaaggcacttgcatctagcaactccctgagtgcttacaaaagggcctctgctcccatgtacagatggggaatctgaggggcagaggcggcgtcacctacccagatcccctagctggctgactccagacaccagtacgtaaccactgggccatgcggcctctgtcaaagggcacatctcacaccctggaggagaggtttgcaaatgaggctgaaacactgctggcacatgaaagccactgtcccacatgcaggggcagcccagcccaggtggcagagagggctctcccaggtcacagctacatagagatggcagggggaggctgagagccatccaggcttttggcgtcttctggcagcacacatccctggggaccagctgaagctggggaacatgtcagtgttccaagaaatggcaggcacgaaggtgggacatggcctctgcaagttcagccctggggtggagagaggtcattctccatcttcatacagaaaacatggcctaagagggacagagaccaaaaagttccagaagagactgagcagggagaggggctgccagcggagacctgcctccacttcctgaatctctgaggccagggtgacaagtggtggcctcctgtgaaaggcccccgagccaactaggtccctcaccctccagctctagctatttgctgggtggaactgctggggaggagcatgctaggccctggtgctcaggacctcatggatgagggaaggaagaagggagtcagtgcttgaaaaaagtccatctggggaccttccctatactccactggccacactgcctgccccctgcaggttctgtttacagacctggccatttatttacttgctggggagcaaaaatgggaaaatgacagtgctgtcatgggaggacccggaggcaaatgacatgcccaaggccacacagggcagaggattctgacttgtcacaactgctgcttccaggaacacccagatgcgtagccccaaggcgtcacgctacactcaccggggctgccctggggagccgagcctgccctccaactctctggaagaacagggacccaggcacactgcccccggggcagatgactgcacttctctgcgcctctggttcttcaaacagcaatgccttccactcaaggctgttctcatcatccgacggcatcgaacttagatcaaagcatgacctggcacaaaaagcctctcaggcgcctcccctccgcccgaagtttccaaagacttctctaggcctctgcactccttcccaaggcacagctggacttgagacctcgttgtccagcacgagactcaggggaggaaaacaaaccaagaagccagcgtcaccccacttgtcagctggacagacccgcggtccagagaggggcagtgacttgggggaggcacacaagcaggcaggacttctcccataccagcttcatggagagaacaggccttggaccccacgtagtgtccccaggggaccctgggggtctcgctgtggctaagcggcctctcatcccacccaccggccctgcccccaggggttgccgtcctgtgacccacacagggcgctcgggctgccagggccttttagagtcagagccgctgagacttgggaagggggctggcctccctgaggtctcctggggtccccagcagggcagctaagacctgagtccccagcggcacgtggcggcgctgcccgatcggtgatgtcaggcccaccacacccgggccccagcacgttccttctcagagtcggcagagcagagaacaaagcgtcctgcgcattcttgcacgctgactcatcgcctgcacgtagagccacagcagctgctttgcccaaaattggtcgggaggcgggggcgcgccagacatggcagcctggggtcctctgctcactcacctgctccacactctccaggagcccccagtcccaggatttcccaaaacaggcaggaaagcaagaggcactggggggcatgctgttccccaggatagccagggctaccccctgggggagggctcgtgatcaggcacaggtggcaggctggggataaggcgtagatgcaggcactgcttgtctttgagcctcagtttcctcatctgcaaaatggggatgtgccagttaccattttaagcgtttgatatgagttcttttcccatattcttacaccaaccccaaatggaaatactgttatcatcatcatctcacaggtagggaaactaaggcacagacactgatttgcttgaggtcaggtgctagtgggcttccctggtggctcagtggtaaagaatctgcccacagtgtaggagaggcaggagacatgagttcagtttctgagtggggaggatcctctggaggagagcatggcaacccactccagtattcttgcctggagaatccatggacagagcgtctggtgggctacagtccatgggattgcaaagaattggacacgactgagcactcacccaggcacaagtgctagctagctgcagaggtaggatttaaatatgaattgtaaggttccagaatctgcatgtatcccctatatgctaaaatgcggattgaaatatctggtgcccagcaggtgttctcactgtgccctgacccttggtggttgagcctggtccctcacttcacctcactaaacctctaatccctcacctgtaaggtggggtaactgtgaaggatgccctcaagggattgtcagggaaattacactgaaggttcaagtgtgatctgtggaagaaaaggtagatttggttcaacaagccttcaaaccacctttggtcatctaggccaataccaaagtacagagaggagacgagctatgcctggggtcaccagccaggccaagccatactcgtctgggcctccccaggagtctggggaacacggagttgcctgtactctttgggaaagtgagggagcaggaggggccctgccatattccctctgccagcctggcctctcgcccccgacagcctgatttcagagaaggtggagttctttggatctgtcctgtgtcggggtcagaggcttgccctgagtttgtaggaatgaggtggccaccaggtggctttgttctcagctcttacccaggttgcggtgtcccccatctgaggcttgtctgatagtccagagaaagccctagaaggaattcagcacccctaccaccaccagcccccgagccaggcctggtctgggtcccagcgggtctgggccaccacggcacagatgcgcaggactccactctgtgcgctcagtcgctcagttgtgtctgactctgcaaccccatagactatacatagccaatcaggctcctctgtccatagaacttcccaggtaagaatactggagtgggatgccatttcctgctccagggtgtcttcccattccagagatcgaacccacggctcctgaatctcctgcatcaacaggaggattctctaccactgcgccacctgggaagactccactttaagctcaggaggaggtcagctcgggctgggtgtgcacggcctgtgcactggcctccaagctcctttcatccctgggtcctgcacactctttgctccagctcctagcacgtgccatgctcttccaggtctcccagcctttccccatcccatacctcttgcctggaatgccttctccaccttcagagcctcttttggatgcctcttctgctggaaagccatcctgacctttcaggaagaggcaggcactcattcctctggggtcctgtagctctttgtcctccctctttggccaacagaaagactgacacagaacacacactggcccttatcccatagacccccccccccgctgggtccatattccaagaaaaggccttcaagggccctccccccaaatcccaactgggacagagacccacagacccagcccaggtcttgcagagcaggctcagcctgtctactgcatgatggcaaaaggcacagcaaaggcgcctgaactcccatctcttctgctcctggctgtgtggccttgggcaacgcctgtagcttctctgaacttcttcattcccaggccttgccttgcccacttcccaggcccgtttggaagatcaaatgaatgaaggcagagagaatgcttggcgcgtgggcacagctccccacacagctgtcattatcaccgagtcattattacggacctgccttgtgcctggggggggcggtgcctccaaggctgggcagcaggcgggcaggcaggcgatgaactcagaagcagccgcagcctgggctgactcaggctgaggcactgggagaagtgggtgctttatggtcagcctgagccagcccagctctggccctctcctcctacccccaggcgtcacccaaatctgaggccacaaggccttccaggccctttcagggcctcttatctgggaagataaaggccccctccccttgaatggtggatctattcaaatggcttctgtgtgaccttggcaacagtcaccctctctggaccaggcttggggagttccggggtggggggcaggcagtgacctcaaaaggctcccagtgtgtcttccaggtgcttagtggggggactctcccactgctttgggccccagagggatggctcctgttctctccctccctgacactgacctgctgctgctgctaagtcgcttcagtcgtgtccgactctgtgcaaccccatagacggcagaccaccagactccgccatccctgggatcctccaggcaagaacactggagtgggttgccatttccttctccaatgcatgaaagtgaaaagtgaaagggaagtcgctcagtcgtatccaactcttcgcgaccccatggactgcagcccaccaggttcctccgtccatgggattttccaggcaagagtagtggagtggggtgccattgccttctccaggtgatggaactcccagtatcctccctagagtctggagttattatttttatctgacacataagaaaaatgaggcccagagatcaaaagaccctcacctaaggcagcacagtcaacagccaggacacaggcatgtgaccctgccagggtcttcagggcccacctactgcaatcctctattctcctgtggcctcctggctggcgacggctgcctctctctttccctccctggtggctcagagggtaaagaatcggcctgcaacacaggagacctgggttcaagatcccctggagaaggaaatggctactcactccagtattcttgcctggaaaattccatggacagaggagcctggtgagctacaatccatggaattgcaagagttggacatgaatgagctactaacactctttccctacaccctaggacaccagctctatgccaaggcttggacaacagtcaccaacttatgagatcttcacatgaatgtaagacagaggaggaagtcaaagctcagagagctggaattgcttggcctggtcacacagcacagtggtggctggaggctcagtctcccatacctctgctctgtgccctagaacagctgctaccccaggatggtaggggtttgaccaggcctcagggagcctgcagggcagccctctggtttcacagacaccccctggctatgggtgggccaaagaggaagggtacccatcctgccaggatggacctaccaggcccacctgggcccgacgctccttgccaggctcagatggaagcatgaggtcattgggccatccctgctccctgttggctctcgctgctgtgactcagccctgtcttccccaaacctccttctccagggaactctagcaatggtctggcctggccaggtctgctcccgctgcctgtccaccctctcagggcctcccagcctgagtcaccgctcacctcaccacctggcacaatgctcaccgcataaacagactattcccctcccccaggctcccagggttcctctccctacagcccaggagccaggctgaggggtgggggcacttttcctgctgtccccagacttcggccctgaggtccatccccagaacctactttcagggactctctggccttgataggaaaatctagaattgagattgaggcctcagcccagggctcagactgacctgggctcaaatcccagctccttccttgttaggtgggtgaccttgtacaagatacctccatttgaaggagggcaacagtaaaaccagctgcagcccatgaagatttcctacagcatcaccgaggccaggatcctgcttaaaaatgcaggtggctctagattcaaatggtggtatggcctcgcgtaagccactttgcctctctcagcctcagggtccttacctgcaaaatgggaacgagaggaagagagccctcctgctgtggtgactaaatgtgataagacatgaaaaaggtcaagccgtgtctggcacccagggaccaaacacgggtaaacgtttatgtggataaacggtagctgtaattaaatcttaaagtgacgtgtgcataacacatagctcgtgggaagctgccacatagcacagggagctcagctcagtgctctgtggtaacctagacagtgggatggagggggcaggcagagggagatccaaggaagaggggatatatgtatacatatagctgattcatttcactgtatagcagaaactagcataacattgtaaagcaattataccccaattaaaaaaaaaaaaagtgccaggcgttaagtgatcccaggatggttttaatgaatgatggggagatggagagcaatggtctggctcttcactggatgatggagtagcatcagggaacggcttcccaggttggaaagctccagcatcccctctgcaggttgaccaccccacttcccttagtgggtccagaaggctctctcaagagtctttctggctggggctggcctcacagttttccagtttccaggccactcaagaagcacttcactttacagaggacaaagctgatgctcagacaagggaaggggcttgtctgcagccacccagctggaagctgagcccaagcctgcacttccgtgttccccttcttcccagcctgggagctgcctccctggactggggataccctcacctcccagtctcagagagcactctgggagagtctcagagcttgtctgcacactggagactctttatctttgtctctatcttcccccgtaatgctcgagaggcagctccttgggccatggggccagtgaaagaggagaggacccaggagaaaacttctgtgacctcctcatttccagttcaacgggtgatgtgttgagcatgtgatctgaatgagggaacagaggctgggggaggtcgcatacgtaaagggtgaggggatagaaataacactgaccctggggtcaaacagacctgaattcaaaccccaaccattacacgtcaagctctctaacttctcagaatctgaagttgcatctgaaagcagatgccttgagatgcctcaaagggttatgctgcaaagatgaagtgagagcaagagtgtgaccaggctccgtaaatagggatgaaagtgaaagtgaagtcgctcagtcgtgtctgactctttgcgaccccatggactgtagcctaccaggcttctccgtccatgggattctccaggcaagaatactggagtgggttaccatttccttctccaggggatcttcccgacccagggatcgaacccaggtctcccgcattccaggcagatgctttaacctctgagccaccagggaagcccgtaaatagttatagtcagtaataatgatggctaccaccgatggagctcttcctcatttaatccttacacagccatgttactgtgattatacccattttacagatgagcaaactggagctcaaaaaaggaagaaagggcatatgtgatggggaagaaggggtctgacaccagaaccagagaccttagctactagccagccctcagagacataaaataaagcctagccagaggtggttatgggcgtgtgtgctaagttgattcagtcgtgtccgattctttgtgataccatgaactgtagcctgccaggctcctctgtccatgggattctccaggcaagaatactagagtgggttaccatgcccccctccaggggatctcctgacccagggaatcaaacctgcatctctatgtcacctgaattggcaggcaaattctttataccactagtgccatctgcaaaggtggctatggatgagaatattgtgggtgttcagaggtgagttagatctcatgtcttggatggagttgggaaggctggtccatggggtcacaaagaatcacacatgactgagcatgcacgcacgcacctgggggaggcaacctttttgatgggccttgagtttgggcaaaataaatcaagtaagaatggaaggaggaggaaaggcccaccttgcacagaagttgggaggcgagaaagtgtgcagtgtgttcaggaagtgacaagcctctgggaaaaggaaggaaagacaggtccaagtcaggtcccaagcaggccttatgccaggtgggcatttggactgaacaagatgcttcacgctgacaccaggccaggtcctggctccagaagcctggttttcataggaaggcaaattgacccaagtctcaatacccctcatgtctgttgtggcatcaggtactgtgccaaggcaaatgtgggtgagtggagcaagccaggctggccttgggcacctggagggactgtgtgacccagggcagtggaagggatgctcgtggtgcagctggcacatggtgtatagattcacacactttctactacatcccccccaacacacacatgcacacatcactcttttgcaggagtgtgtccacaccaagaggcccacacacaccctgcagcctgaggtgagggagggagagatagcagaggcctgctgaaagaaactcctgtgccaggcaatgggccaaagcgtccacgagctctgccacaaagcctccttgcggctatgaggtaggacttttcttcttaggagtctcggatggatgtgacctctgatactcaggaaaattaaacagtgctatacgcttggtcccaaggttggtgagcagcaaaatgaaagcacagactggctgcccctgccctgagctccgtagggcctgacacagtgctgggcactggggataagtggaggattggagtctgagtcacagggctttgaagctggcagccagagcagcggagcctcagagattccaggggtgggctggcccctgactcacccccacaccctgaggctgccccaggcagtggctttagctcctggccgccctcctgcctgccagagcccagcaaggcctcttctgagtctgtcatggctcaggattcccaggagctgggcgggcagggccaaagcctcaaggcaaggaggtatcctgggcacacctctgctcaggtatgtaggcctagagtcacagtgggaaccccggacctcaccagcctgatgtcagaggcaactaggcacttggggatagctgttaaatgaagaatgaaatactgtatttctgcatggcccagactccgggtggctcaccccttcccagagggaagacagccgcctggtgaggtgctgggtgcgccctggaaagtatgggttctaggcaacacggtgggtgtgactctgcaaaaccaccagctgcgtgtcttggctggtggtagtggagggaggagaaagctggggttccagcccctccaagtgcaggggcctcagagatgagaatccaggcattctggatctccaggatctctggtgggctgttccttctccctgtacctcagtttcctcatctaggtgtaggccaagggactttccctctctggctgcctgtcttttgcttttagaaattatgtccaagccttcatcgttagagcattttgaagatgtaatcaggcagaaaaggggacataagtcttcttcatcttaagcggtgtctctgcaagggcagttttgtctgatgagattaagtcatcttgtatattcactccagccttgggcctggaccatgtgcccaggcctgtgtgctaggccctggggttgggattgcaaagaagactgtgtctcagtgagttcataatttggggggagagacacctctcccccagaaataaccagatatttccaggacagtttaacatgcctttcaaagctctttgacctttccaatatctctaaccacatctgtcatgatggagaatagatgggtgagagattggttgtatagatatatggatggaaggatggataaaatgtcagataatggataaatggatggatcaatagaagggtggatggatggctgtggacatgggaggttgaatggatggatggagggagggatgaatgggtgagtaggtgaatagattgtgggggttgggggtgggaatcattgaatgtgtgatttaggttcctggtcccacagcagatgaatataaggggaaagttccagtcctgcctcttgttcattgtgtgaccctgaagaattcacttctttagctgtagagtgagaatctgtctggaaagacctcacctatcaagtgagagtcatgagcccagcctgcatcccaggtctgttgtgggtatccagtgaaagaggtatggactgcccatgcctacataatggctgtgatgagtcctcagtcagtggcctcacaggcaccggcaacgtgaggtgtttttgctgagggagtgacgcccctctgtggttgctggtgtgttcctaggcttcccacttcctccagcctgcacagagttctctgcccagttaggagcaaaggaggtgacctctgcagaagtgttgctgccagaggctccccatacgctgtacttgtcaaggagtaattgaggtgtcctgtttgttattcatctcagggtaagagtaggctcagcaagggggcacccagggcttgggattagggctttggagttacatagatctgccttccagccttggctctgccacttcctagctgcctgacattggacaaggcatgagcctcagtttccccatttataaaatagtaacaaattatagtacctaccccttaggtaggttatgacaattaataagcataacttatgtaaccacctaacatagagctcagaatatattaaatgcatgtgtatccaagtgcagaattgcgcccttagaactttgaagaaaagtccaaaacttcaagtctagagacctccatcttgaatgctcagtccttggattagtttccttatttcaaaatgttcagtgggactgacattcttcttgacaagtgtgccttgactgaacagtgtctggttttggctgcaattccaggagttccatgggcctcgctgaccctgtcctgattacccttaggttaatagcagactgggcacatgaattatccctttaaaagtggtttgtgtgggagctacaaatctttccaatgggctgagctgtagggaggaggagaatttagaagggggtgtcctcccggggaagccgcaaagaccaggagagctggtcccacaggaccgaggctactcttgcagagacccagtgtggggacgatgccgtgggcggtggcaggccctgctggctcagggtgagctgcagccgatggcaaggggcccagaccacccaccagaaagaggccctgagtctgagtggccctaggcttgagtgggggcagtcctgacctgtagccctgaggacataactcgggaacaggtcattatgggaatgtctaagctccctcagtcccgaaatccccaactcaggctggctccggggccataccctccccagacccccattccttgcagggtccagatatcccccttggccagccccatctgcccatctgctcgctctgctatatgcctgcatggtatgtgcctgcgactgagactctgtgtcccttccattgggactgcaatcaagagagcttcctgaaacctggtggggccaggtgacaacagggaagtggctggttttccagaaagtgaaagagcaaagggttccaggctgggagcaggagtgataacaatgaagtcacagagtctgcagagcttgcattttgggagctggaaactcagggcaggttgattctgcctgtcgtaggctatctgagctgagcaggcccctcacagtcgatgggaagagaggaaagctgtccagggaagccaaggaagggacaggacttgcccaaggccacacagcgtgaatagcaaagctggggacaaagctgcccactgctacaacatcgggtagctgctccagccctttcctgccctgttggacatcatcagaaggatgtttaatcctcgctcctgtacatcctccatcccatgccactggacagctattcgatgggaccaaatttatcattagtacaggggcaatcaaaggagctttggggtccccaggaaggtggcctaggcccatcccaatgtccctgccttcctgccagtgggatccttcctgacagcccttctcaaagggacccagtgcggctcagcttggacccctgggaactacactggtgtgcaggaaagggtgagtctggattagtagcccggagagtgtgtccagcccatcactgtcttgggcaagttgctcctcctcttggacctcagttatctcatctgcccaatgggagtgaaaaccagagagaatttctagaaggcagttcctagcatggtatatttcttcacccaaaaatacaccccaactatcctcttctgccagcccgccctccccacaaatctctgcttcttggattaggctggtgccaagtgtaagtgaagcaaattagtttgtgtgcaaatcaattcctccagcttctgacagggtgatctcctgtgaatccctgtgcctcagtctgcagcctttaccaacccaggcagggagcggggccaggtggggctgaggcagtgcagcagagcagctggtgggggcagtcagtaggaaccagagcaaaggagttgagggcccatgcagccaggtcagccaggaggcatagaggtgactgtcggggcccaggcctagagacctagggtggatattcttgttgttcttgttgtttcttagttgctaagtcatgtccaactcttttgtgaccccatggactgaagcccaccaggctcctccgtccatgggattctccaggtaagaatacaggagtgggttgccatttccttcttcaggagatcttcccaaaccagggatcgaacccacatctcctgcattggcaggcaggttctttaccactgagccatctgtgaagcccacgggccaggaactaaaggaaattcatgtgtgtattggaacagttggcttgtgcagacagaccatgatcatgtcaaaggcaagggaagagggaataaagaaaactgctgtttttaactcggcttgattttctctacctggaaaccaatcttgccagtgaggtggtgctgttcccggaacgctttcagccgctaagaccggggttcgctcaggttcccaggtccggcgtctccatttcacaggagccctgctcgcccggctggagcagcgggcagggaaggagggaaactggagttgggcgcagcctcccaagctgaccctgccaggccgggcggtggcccctgtcctgtcgtcatcctcctttcacagcagagagggatcctgtctcctggtctcgttaattcttctatcatgtttcccagactcggagcctctggttgcctattgtcctgagcaggcattttgcatttatgtaaagattagacaggttagaaccttcgctctcactccgatggtcttttttactttctcaaatccaagttctttccttctcactgcgctctgcttccttattctctctctctccctacctgtctttatcagcctccctgtttattttcttcccttccctgaccccctccttctccccactgacctgcttttcctctgtcctctcttcacagttcagtagtttgaatcctctttctcccccctccaccaccgccaccacaaccctaaccttgcttaattccatatttatcttctcccggagcctcatagaaatgactgaaagcattgctcacctcattccagaaataactcttctaaattcttagagaggcaccgcacgggggagggtgtgagcactggacagggagtcactgtggtttactggagagaacaagacccaggttcctctgtgggctcttgggtacaccagctgtgtgaccgtgacaccgctggcctctggccagtctctgtttcctcccaggcagcagtggagctggcacccagatgagaacagctgtgtgtaaggttgtgaaggagagaggacggtggtgccctgcacacacacttgtgctctgaaatgtttttcctgcttccaccgcagcctgagccagtcggagggaaggaaggggatgctaactggtatctccctccttggttctgctctgctctacagggatcacacatgcgcgcacacacgaacatgccctgggaagaaacaaagctgtttcttcaccgtcatctatttctcccttccaaaatgtctaatggtaaaatcccaactgaacacaggagcaaaaacttgggctttagtgggttcctgaatttctccatttcaaatccaggccttcattcattcaccgccccctccctcggacagcactcactcagagtctcctactgtgtgccagacgggctccagggctggccttctctggagctctggacctcgagattgttggggagataagcccaatgtcatgagtcaggcatgagagagagcacgggttctgggagttccaagaaatgagagggcctttcctcttgtgcctggagacagggtccctgagaaggagggactctgagccagccgaggggcaggagcaggatgctggcccccagggagcccctccatcactctgccttttttgcagaaagtcacagaggtgagccaagacatcctgtcctggccaagatgggaggttttcccaggggcttttggtgtacatatccacaagccacctttctggaaagggctctgagggccccttcttagcatcaaggaaatctgtgggtcacataggttaagaagaaggaaagaagggcacttcctgggggaggtggggaggaggcggctccaggctggtcagtggtcaggggtaaactgtgtccttccctaaggaaagcaggcccagagaaggctctgactctcccaagtccacacagccttgtaggtcatttacctcccacgcagcagaagggacaccctccacctggttgacagtaggcagacaggaaagcagggtctcctccaaggaaagggagggttttgcccatgggacctctccctcccaactctgagctctgggcaagacccatggagagtggggaggggctcacggcatttggaggatgacttgagggggtccagtgggactgaaaggggtccctggggacagcacgggagcctcaggactccaggaggtgctccaggctcagagggagcatcctcccccctttttcctccctcatcctgccctcctccctaccgcagaggctggggcgggccgggcgccctgggaggaggcggtgtccctggctccctgcccaccggtgcagggctggacgggcaggggcggagccatgcctggtgttataagaggcagccagggcaccgaggcaatgagctgtcgctcagcttggcagcaggacgctggcagcaggcacactccgcactccagcccagcctgagcgtgcctcaccactgtggtcgccatgcccaccgccttgtgctccatcgctctagccctgctcgtggccctgcacgaaggtgagcaccccccacgggctcagcagctgcagcagccccgaggctgcttgtctgtatctcctgctggggctctgtgccccccaagccagccgggggccttcaggggcaggagttaggtggcttgggggctgcaggaggctgtgctattagaggtgctgccgtcccaggacagccaccggtccttccaacccagagctgctggggcttccccaggctggcccagggctcctgagcactgagaatgccaacttcctcgattatgcaagaggaggagcccagcgggtcccccatcccagctgtgccaggcgccctgacccacctctccacttttctctccctcctgtgcatgcaggcaagagccaggctgctaccacccccatcccagagcaaccagcgcccttgccccgggcccgaggctcccacctgcggactcgacgttgctcctgcagctcctggctcgacaaggagtgcgtctacttttgccacctggacattatctgggtgaacactcccgggtgagctactggagggatccaagaggggttgcagggggcaggggtggggaatgctggcatgctggggaagccctggcacactgcagctctctcttggagtgtggggctaacaacaatagcaatcagctattgcttcagttctcacgtgggggctgcctgagcaagacagagggctgtctcatgaaaatcctcacaaaaagcctggtcagaaagtgttggctccattttccagatcagggtactgaggctcagagaagttaggtgccttttccaaggtcacacaggaagagtaagtggtaggtaggaggctccagcctaggtctgcagatgccagagcgcacagcggctctgccatgctgcctctgtataatcttccaagaatgatatgattaatgacagcacccatgtcttgactgcgccaggccctatgccaagcactgctggtgcgttatcacctcgtgaacgcacccccatcctccccagtgaagcggggactgctgctgtccccaaatgacagacaagagacctgccccatgtcacctggcagagccggggtggggtcccagagctgtctgttctgtctgcacccgcgctgcctccgggccactgcatacttcaagttgaagtttctctgtgtgtttgtattttttttttccttctccaaattgcaaaagacaagagaagcccggcacgtaagcgtgtgtggagctaatccgcatccaaacactggctcagggcgggaaccctgccagtccctgcgtgctgggtctacctggagtctctgcagctccaaccacaccgtctaaaattagctcaggcatccgaggtgctggtctgaccggccacggggccctgcccttcgcctggcccgtctcagccagacggaatctgaaatcgatctcagccaatctaatatatctatgcacacacacgcacacgtgcaggtcaggcacacgcaccattttaaagtcaaaactctaagaaacacttgggtcacccttccaggcaagtggtgaccggatggaggcagctgagctgtgagcctgagtgttcacttctgtgagagggcactctctccctttcttccagactagttgggggtcttctttgagaacagggggaccagcctgactccatcagttcaaattgctgtctgggagtgagaggggcagggaggacagcttccacccctcccccccatgctgagcgtcttactgagcaggaccagggcagttgggagggaacagaggcccgagagggtaagggtcttgcccgaggctccctggcatgtaaggaggaagctgcagtgggaattcttgagggcaggagctggttacttttgctgccaccctggtggcatggatggctatcccagtgtgcagtgtggacagtcccagcttgccaatggtcctggtttatctaatcctctctctgtctctctccaccctacaccactaccttgctggcggcccgcccacagacagacagctccttacggcctgggaaacccgccaagacgccggcgccgctctctgccaagacgctgtgagtgctacagtgccagggaccccgcctgtgccaccttctgccatcaaaggccctggtaagtgggcacccagcctgcaaggggccagaggtgactgctggcctggacctgctctggagggcagggtgtctggaaggccagcagtggcggactgttagtccctaggtcgtgcccgactgtttgtgaccccacggactgtagcctgccaggctcctctgtctatgggattctccaggcaagaataccggagtgaattgccattcccttctccagggtgtccaggaggccagcagaggcgtggctaaatggtggaggaggggccaggggagcagggtcctgggggtccagaggctgccctgggctgtggggcagcctcccttcctgcagggagccagtcacccttgagtcttcccccctgccactacccccagctctgggggcttctgagaccattgcgtccccactcctgggcaggaggaatcctccccaggtgatagctgaggcagcacaggtccagagaggaaacaggacttgtcctgtcaggctacacagccagttagacgagagctgggccttccgccttagtcgctggggctctgggacctctggaactttctcagtggagaagcagtagctggagttggggggccatggcaccgtccccgagctgccacaaagcgcctttgccagtcttttggccctctggacctccctccctccacgcggagcgttgggaaagcagacagtgacttcaccctcccctacctcccgctctcatgaaggcctatgggaaactcctcccctgagacctcagctgtggctgcagccctgcctcagtttccctgctgagggttctgcttggctgcaagtggccagactctgggaaggccagccaccccactgcctctttctgaggctgagaacgcattcccagtggctcagttttcctcaggccccaccccacctgggaaaagaagggtgccaggtgcacagggtggaaatggatctgctcctgagggcgggtcggggcggggggctgggctgggcctgcagccaggcagcctgggggccctggacagcccctcacttgggccctaatgctgttcactcaggactgatgcggtggcagtcccaggcagcgggtcccctgcagctgcgttccaggatggcaagacacaggccacagcaggagagctcctccagcggctgaggtgaggggcccctacactgattgagtgccttctgtatgccttgcacatttcccttattctccatatgacgccttgggtccttatggggcagccaatagcagctcagacagatgaaggtgtttacccaaggtcacagagcaagctacagcatctggctgactcaatagcctgtgttcttaaccactatgctctttgttaccgccaggcctggaagtggacttttattgagggtttcaaggcttgtgactgtggaaggttcccaggtgttcattcaggctgtgtctgaatcaagcatctcccacatgctggggtccaaacggatgctacccagcctgttccctccctgggtcccagactggactgtctccctggtagctacaacatggctcagctcaaggcttggcatccaggaggtgcccatgaacgtgtgtccaaccaaactgacttgagaacagaaacctatagccagtcatgtggcagggtggctgaaggggcagcatctgagctagaaagtcccagccctgccacgagcaagctttgtgaccttggtctgctcactgaacttctctgtgcttctggttcctgtctgtgaggcagggacaccgctgctatccatctcacgggcttgttgaagtttagagcagttgacatacatgaagagccccaagaaagcccaggccctacgggagctctgaaggttttagccatcccgaacctctgtccctgagggttcctcagggctgcccagggccggggtgcagcctagcccctcaagggtccacatctctgtgaggaggcggaaacataggcaaaaagacaggatggccggctaggcaggacccaggatatactgaggaactatcttaaaaaaataataataaaatgaaagtgttagtcactcagtcgtgtctgactctttgcaaccccatggactatagctcaccagactcctctgtccatggaattctccaggcaagaatactggagtgggtagccattcctttctccagaaaatcttcccaacccagggatcaaacctgggtgccccgcattgcaggcagattctttatcatctgagccactagggaaacccaggaaatgtcttaagatgaaaaacttcaaggtaagactttgcaagtacttggcattccataattagcaaagagtgttttcgccagtctgtactcagcctcacaccagttcaggcctgtgtttattttacagaccaagaagggggttcagagaggttgagacccttgcccaagttcccaaagctgggaaccagcctcccagttcccaggctagaacgccttaagccagagtgaggccacctagatgacggcagagcccctaccagggtctcagccagattcaaaggactgctaggatccatacatatctggagctggaccttgaagaatgggaattttagggcacggagtatggggtgagtggaaggtcaacagcctgaagagccacagggatagaggtgtggaagtgagagggcaatcaggggagagccacggggctactcttggccgtgcagtcaccctggtggcacttgatgttgagcatcaattttgtcaaagctccttgtgggcagaaaagcttctaacctgccccggcctctccttgaggttcagaccttgttttcagggttggctgtgaccaccctctgacctcttggccatgaataaggaatccagaccctatgaccgctgcctctcatggggaactctcaagtgatgtatatctccagagatgctcaattgacctctttccatttcagggttatttctgcaaccaagatccactttgctaggcaacagcagaagccgacgagggagaccagacctacacactccaggcagaggaagagatagctctcgactctgggagaactttgggaaggaagcctgtgtggatacaggaggagaggggcatcccagagctgggagaccttccgacctgtttcctgggccagaaaacccagctgctggagcaggcacaagctctggcctcctcgccctggggagggggcctcgctcaaggcagctccgtgacaccaggaaagtcatcaggccccaggctgcagcgtggcctcccacactggctccagttcctaggccctgctgaaaggaacggcatgcggaatgtgctagcctggaggtgtcctgtctggcggctgtgaaccaggaacaacgtgcagtggcgggcactcacacccaagccagcccgagtccttccagggttgaagtcccggccgcccccgacccctcacccccgctctgtcccctccagccctcgctctccagtgtccttattctcccttcataccctcggggcactcttggtgagaagggcctgcaccacttcacctgtctgtatataacttatttgctctaagaaatttgacgattccgattatttattttaacgtatttttttagactctcaattatttacctgcgaacttgtgtttgtaataaacaacaaaataatgctctagcatttggtcttggttgagcaggaggtgggaggcacttttcaggaaggggctacttagaagtgaagggaacaaagggacggcggggaaagagcctgaggcaggtgtggagcactgagttccacacccctgtgccccggctgggcatcgctggctgctgacccaccctctctggacttttgcctatcatgtgcctagacagccatttgcagctttgatatcccgggttccaggacctgtgtttctatcaggccggtaagtgttggccaggcctttccccagagcatgtttcataggagccaagactataaggacccacttctgctctggttgccacccctgaggttcagagcaaacctgtccagtgagggctgtgtgctgttccaagactgtgtgcagccttactggccagggatggctgttgtaacggagtcacaggctggtccttatccctcaccctgggcttggacagaccccgctgggggcgctcaacacttctctcactaaagaagcccagggctctagcactggcttggctgatcctgccaaggccccaggaagctgctcacctgagtcccagggacagccagaagctacccccgctggcagctcctgagacctacagcctccactgctgccaaatccccctgcgaacaaactgttccctttcccctggccggcctctgctgggaatggtacgctgtggcctgagccagttattgaaaaataattatttacacactactctaagcctgccttgtccatggagccagccccaactccctcctgggagaagaacatgttgacgcatattgaactcctactgtttgctggcattttatgcagataaactcacttcatcctcatgacaatcccatgatatagatacttttattatccccattttacagatgaggaaactaatgcacagagaaggcaactaattttcctggggtctcgcagcaagtaagtggtagcatcaggatttgaacccagagtgtatagtacacatgtctatatgtactgactaaatatttgttgattgaattcatggattaccactgtagtatgacattgaacaaatcttcctctttctgagcctcagttttttaatctataaaatgggaaacagtactttccactttgtagagctggttgtgaaccctaaatggatgagttatggtgctgggctcagtcctgggcctgatgagaggcaaagccgaatgtcaggccgttagaagtgatgatgtaacaagagggacaggcacaaagctgcaggacctaagttggggggagattggggctggctggtgtgcagaggcatggtcagagaaagatgcacgactaaggtgccactcccacagcctaaggagagtgagactcacatcaatagaaggaaagtgaagagggagccccagacagagcagacaggaagggtaaaaggttttggcaatgggagtgacaaaggggtttcccatggaggaccccatgtggctggagcatggtggggagagagcagcaggagaggaaaccaggactccctggaggccaaagtagggagcctgcactttctctcatgggccatggggaccctcgaaaggtctgtgggcagcagggacctggtaaagccagactttgaaaaaatgccagagggccacacagggggaccctgaatggggagacagaaggcagggaagcaagtcaaccgctggtccttagggatccagcctgggtggctggggttggcgatggagccacacagtcacttcctacccaggattccggcacacctctgaaatctcactgagcctaacgccaggtgaatctcactccccagcatcctgttcaaaataaccctgcccccacggaaatcccaaagcaacggccaacagtcaggctaggcagtgatgtggggcaaccccagcatggcaggagtgatcgagaccaggtagaggaatgtaggttgaaggtgtgtccgaggcccagggaattaggcattcactgccctggtcagagttcagagatcagcgaccaaatgattaagtaagagacaattagagggaggcccagaaggcaggtgaaggcaaggcgataccataacccccaggatccttactctcaagaaatgggggcccctggcttgggccctgcactctagccctctgccagccatatctttctctccaaataagaagtttgcagggtgaagggtcatgaatacccaaagtctgagcctgcttctaaaccacattccatgcagcaggggcctcagaagtgtgggggaaggtgggatagagtttggaagaagcagaggaaaatttatgaagaactgttgccaaatcaaactgaaccctgggaagaaaggtgtcaacattttagaaagcatatctggattttatgggacaaaatcgtccctttttcctgcctttttctgccttttccataaatacttacaggtttggtttaggctttctgagttaaacttgtgttccttttaactggaacaccaggcggagataggccagaagggggcacagggtgacccagatttattcgggtcatgtgcatgcatggaagcagagtcagaggggagtggagttccatgtccaggactgtgcagcctgatacatatccaggctacagactggccctttcctgtcctggactgcctctccctccactctctcattcagcaaagaaccccaaggaactagtttcactcttgccatctcactctctctctgaacctcagggatttcaattgagaaaagtcatttgcctatcagggcaatgaatcattggagtgtggccatccatgcgttcaacaattatgaacaatcaccgttcagagactcccgtaaacaaggcagacacagcccctgccctcacaggccaagaggagagcctttcaataaagcactgttactatgaaggtagaagtgaaagcatttattgagtgctcatcaagctcttcttgcacatggattctttggatccttgcagcaaccttacacagcaggttctatcatcgctattcccagttgagagaagagataacggaggttaagcagctcacccaaagtctcatggctagcatgtggctgagctgggatttaaatctcaggctctcagcctgtctgctgtcctgctgctctaagcaggtagatccatacatagtgtgattgagcccctcgggtgggagagtctgggaggcttcctggaggaagtgacagttgatcaagagaaggagcgggtggacagagtgttcaggcagggggaacagtgtgtaggaagggagctatattctctgtgcttagtcattcaatcctatttgggacctcttggtctatagtccgttaggctcctctgtccatgggattctccaggcaagaatactggagtgggtagccatgccctcctccaggggatcttcccaacccagcgattgaacccaggtctcctgcattgcaggtggattctttaccagctgagctacccaggaagcccattctcagaccctatcagggaacaaaagaaggaggcatggggaagactggagaggggttgctagcggggtcgggggggtggtgggcatgcggctacaagcagggaaatccacagctgctgtcacctcacccccaatctgtgacagcctcagacaatgtccccctggacaatattgccatgcctgaaacacacctttggatcaaaccgtgcttgcgccccttggggtttccctaggctggcaaggaagacagacaaggcaaagtgaagagacaggaggtggataggttacgggctgcccttccagctgtgtgcccttcctgtctccctgggatctctgctcatttcatcccaggggcgttgtgggttcacagggaaagcttggggaaggagtagggtttgcacacactgggatgagggaaacagccggagcatagaagaatccgaaaagaggcagcaagcctgattggcaagggccaggctgggaacagcatgcagtgccaggaatttgaacttgagtgacggggagccagcgaaggtggctgatcaggggagagagccaggacaggagctggccttgggcagctggcttgtcctcggctcttcctgcctccccggccagtgcttccagctcaagggggccctcccagcccctcgcaggagagacaaagtgtgggccttgcctccgcctgccagggaccggagccaagagccctcagcagctcggaagggggccatgtgcgggcccgccaggagccctggaagaggaatgtggcctaattaattctccaaagctcagagggcctcgccttgtgggagcagctgccaggacaggcctgccaggacgccacaggcccagcccgtctatcattcagtgctcggggacagcaggctggaagcctggagacaggggcccagggggccagccccttgcctccaggtacacacgtgtcctccagccccttaacagaaaatagtgcgataatagtaataatcgccaacaggccttgagggcttaaaggtgtgtcagactctgtgcaaagcctgttatactcacttctcatctattcattacgaaggaccagtgacagggaaactgttaccatctccattttgcagatgaggaaactgagggacagatgggtgaatttccctggccgaaatcctgcaatcaaaaagcacacgcagggaagctaggattgggatgtaggcagcctgggccccacaagcatgttgtcataagcactgctgagccagcccagcgaggacatggaggcccagggtggagcgatacctttcccggggacagtcgactaaaaacaggccctgggacattgaatagggaagaaagaccacacccctgtcctctgcttgaactgcctcctcctgaagtttctcatagggcttttcctgtctcagcccgtaggtcatcctcaaagacatgtgactcgctactccaggcagatgggctggaagaagacatgccgtctccctgggatccctgctcatttcatcccggtggcgctgtggtggctgcactggcagctgggcgaggtggtctcacagcttcctcctagcccgctttccatccgtccacggaacacatcccctccaaggcgggctctgaatggtgcagggacggctgtaccagggccttccaactagaaagtggcagacccaggagaagatgggcacacagactggcccgaagccaagactctgctcttcctcagcagcagagcaggaggagggcagtgcagccacatcgcatcccctctctgggcctcagtttctcatctgctgtatgggcctaagagcattaactgtatagtcttgtcctgcattcatgcaggctaagttgcttcagtcatgtccgactctgtgcgatcctgtggactgtagctccccaggctcctcaatccatgggattctccaggcaagaatactggagtgggttgccatttccttctccagggggtcttcccagcccggggatggaacacatgtttcttacatcttctgcgttggaaggcaggttctctaccactagggccacctgagaagccccatagtcatgtcctggaactcattcatgtgtcaagtactgtccgaagtagtttacttaatttttaaaaattttccaaagcaaggttttttcatagctttgtaacatatcaccataaggctgcaccatatgcatctgttactctgtaggtgtgtattttagtttgtcccatttccctccaatgcaatgtttacatgtgtgctacatttatacacaaattttatattcattcctaattcttttttgctgcatattttttatggagacataatttacaccccataaaatccactcttttaaagtgtacaattcagggtttttttttaaatatattcacagttatacaaccatcaccactatctaattccagaacgtttccatcatcccaaaaagaaacacctcacctgttagcagttgctccccagatctcacttccccggcctctgtacaccacaaatctactttctgtcactatggatttgcctgttctggacattttatatcaatggaatcataacgtacgtggccttttgtgtactgctccgttcacttagcacaatgtcctcaagatttgtctatgttggagcaggtgtcgatacttcacgcttttccatgactgaataatattcccttatagagacagatcaggcttcccgggtggctcagtggttgagaatccccctgacaatgcaggagatgcaggagatgtgggtttgatccctgggtcgggaaaaacccctggagaaggaaatggcaacccactccagtattcttgtctgggaaatctcatgaacagaggagcctggcaggctacagtccatggggttacaaagagttgaacatgacttacaactgaacacacacacacacacagatcacattttgtttatccatttgtctgcgttgtttccactcttttggcttaagcactttactttagccttcagtgaccctatggggaggtgctctcttttcatcatataaacaacaagactgacatccagagagcttaagtaacccatgcaggtcacttagctagtgagcggcggtggtgggctttgccccaagagtctggctgcagagacagtggcctcaaccactgagcatcactttctcttcagtcagagtaagatagtataaatcagcacccacagcaactgtgccaaaagtggtacccacagggcacttaacagagggtggcttttctcagcagcatttctgacactggcagagccagggtctgccaggcagggcctgaagctggagcaagagtgtctggacagccagtgataatagtgactatctcagtacacgggtggttcttccagcaatggggacatctctccacacttggtggggggccgtgggcactgactcctctgctgcacatctctggcctgcaccccagagcccatctctcctcccacctccacctacaaagtcatggctcccctcctgtccccaaggccctgacactgagtaaccgaggcagcattcttgggtgaggtcaaggtcagagctgcagtggaggctgcatggacccttgaatgggtctctgtctcctcaggcctccacctactaaataattagataagaaatcttaatacttccttttttaattacaaagcaatttaaataggacaatatagacacaaaggcttgtggctttaagataatgaaaagactataggaacatctaaaataaaatgtctcttctgggcctcccactccaaggcaacgactctgagagtggggtaaatagccttttttttttctatgggttcagatatatgttttctatctaacgttttagaggtattaaaaataatgcacggcaacataagtttctctactttacaaccttttcttctcacaccaaaggcatctttccagaccaatacaaggcttttaccacctcttaattttaacagctccacgtggcccttgttaaggacaggcagttgtcacttgactgtccacccactgaagccttttggatggcttgcatttcttgttttcataagcacactacagtaagcacctggtttatacatctttgtctgcagaggacagatttttagacacgaaatttctaggtcaaaggatgagcacattttaagtattctgccgagaatgagattccaatttgcattcttgttcccactgggtatgagtgcccttttcctcacaagccttccagcactgggttttatccatctcttatcgtttgctgccctggtagcaaaaccacttcttcataaggaatacgatgtgcaaaagagctttgcttgatgccacccagggtgaggagggtgaggggtctggagatgctccaatgtctcactctgtcccctggtgcaaagaactcctctagggacttccagcactgctctccaggattctgtttggctctagggctctgtctctcagttccactcaggggttggccctcagggagctaagaatggaggaggggctggccagtcttcctgctcagttggccccagcctcccctaatagatgtgtctttgagtaggcgctcctggggacagcatcatcatgggaaagcgtgtgtgcgtgttgggagcggggggactctgggcacctgaacctgcagatgttcctaatgggggagcctggggcatcctggttccctctcagcctgccatccaaactcacgttttggaaaagactgaatctggatcttgcctctgcccaggtcttgctgtgtagacccaggcaggtcactgtcctttctggactccaggctcccggctgccaggctgggggaatccctttacagggtagatgccgaatctgctccctctggagactccacactggccacaccatgcgcatgagtcacccccaagttggcaggctgagggcaggggaggggcatggaggcaagagaagggaggctcgctccagatgactttggtgccacatggtgagtctggcgcagtggagtcttgcctggctaacgtgagtgtgtgagcacaggcacacagggcacaccgacgtgtgaagtgcattcttgtataccgaccggggatcctcctgctcaagtctgggcattcaggtttacagctcaggtgatgagtgtccatacacaatccatgtgtgtgcacattcttgtgcgtgtcaacacatacacgcatgtgtgcctgagtgcccctgagcttgtaaatcttcacctggttgtggctgcctagatgtgtctgcatgaacgtgtgaaagtgttagttgctcagtcatgtctgactctcctctgtccatgggatttcccaggcaagaatattggagtgggctctctggggcattttcccgacccagggatcgaacccttgtctcctgcattgtaggtggattctttactatctgagccaccagggaagcccagatgtgtgtgcacacatgtgcctaaatccgtgtgcatgcgtgagggtgcaggtgagcctgcaggatgtgcgcacacgtctatgattagagattacgggtgtgtgggtgcacaagtgtcacaaacatacacactaatgtgtgcgtttgtgtctgagcacatgtcaaaacacatgcatagagtatccgtagtgtagatggagtgcgtccacatgtatgggtctagaagggcttcagtgtgcatatgggcacagctatgtatgaactattacagtgtaactctgttgaagtgaatacacatgagtgtacatttgcacccaggaggggccacctcagcgtctgcaaactatgacatctcctccagggcccatcccacctggcctggacctctcccctcaacccacactgaggaaccaacagaaggacagtgtcattgctttaattacaggaagactaagtattttagtaattagtaagtcattataaagcttactgcttttaagaacaaaaatggctatattatagatacaaaatgcatatggaatctgaacaagaagcatggaagtgcaggattttccaccccaatctgggtgggagggcttgaagaccaagtatacacagggctcaggaaggcaagggagggagaggccagagcagagagcccctgcctccatttccaaggctgtccacacctgacctccatccctacctccatccagcgagatatcgttctgggcccagagggccccaaccctggcctgagtggaagtcagggagtgagtgtgtcagaccacctctgacagcaaccagtcaaggcaaggcccttctcattctcccttccgtggcctataactctaagatagtcatacctacctgggttttctcaaagaacctcaaaatataacctccaacacgtgcctacctccttcatcctcccagaacaatttctacctcccacccccagctcctgtccttctctcttggcctgcactgcctccttgccacaggtctgacccacaaacttctactcattggtccaaaaccacgcctgtgtcaccacccagctgtacaattgtcatcccagctggactgtgaactcctgaggtagggaaggctcaggcattcttgggtccccagagcccacctcaacctggcacagcttagatatcactcactatctgattttagaaactgagataagaggagaagaaagggagagcccctgggcgcagcaacgtttggtaaacacggcaggtcgttgggtgccccaagactggatgagtcagcctgacccttgccctggaggaggaagaaaaagtgtcatttatcaggctccacctggtgccagcatcagccacacacttgatccccaccacacacctgagaagtaagcaatatttttactcccattttatagatgcagaaactgaccctcacagaaagtgagtcagcagcagagctgggactcaagccttcctgactcagcacttcctacaggctcatccccccaggttctttctctctgnnnnnnnnnnnnnnnnnnnnnnnnnnnnnnnnnnnnnnnnnnnnnnnnnntcctcaggaacagcccttaatcataaaggattggggtggtgggtagatacgccagctcacttgcaccatgggtggagcaactctaaggctgcttccacaccctctcccggaggtctctggaggggctaagccctgtttccacctgttgctcattaacttgtctgtattggctgcgcttcctttctcccttccacatcttttatggatcttagaaccacctcgaaaataaactccatgccctcgaatcttagtccaggtcctctctggggaccccaacccaagaccaaggggcagcagccacagggactgtgagtctgggaaagccagggggacattcttgcaaagaggcctcggccacagaggcccagagacacatgcaggtccagacccatgggatgagccctggcaggcgggaggccagcctgactgcagctccagagctgcacacagtgtcaggctggcgcatgaggacgcaggagcaccagggtaaagagggcacgggtgtgagcacagcagctgatggcaacggggtttatctcagggcccaagaccacacccacacctccctcccttctgcagaaatgggcctggaacacctgtgccctggcaagccctagggtagaccccggctggaaaaccccagggctcccagctggccttctactgctcagcacctctggcctgggtcctggcagagcagggaggctgcctggggaaggtcttagatggcaaatctgtacaattctgtgcctctctgtccttcccattcaagaaatggcacagggccttggtagggccgaggaagtgaatggagggatcccagcacctcagagggcccctgttctctgactctgccaggacatagtttgcacacagaacattagatgtggcatatcttgcttccccacgcttttcagaagagggtgggcttccctgatggcactagtgttaaagaacctgactgccagtgcaggagatgtaagagatgtgggttcaatccttggatcaggaagatcccctggaggaggacatggcattccggtactcttgcctggagaatcccatgaacagaggagcctggtgggctacaggccatggcatcgcgaagagtcagacacgactgaagtgacttagtatgcacgcacattacttaacccagaggaatcaagttctaacggtggaaattcaagcattggaaaagacatggcttgattttaggagttggccttccctcaaatcacaccatgtcaaatctcagacaggcagcatcatgaagcagaaaaggcacaggctgtagagccagacagacctggctcaaatccttggagacagaaaagcccctcatcctgagctttggcttccttggctgtgaaataagttgacagtgtccactggcgggagacctggcttcagtccctgggttgggaagatcccctggagaaggaaaaggctagccactccagtattctggcctggagaatcccatggactgtatagtccatgaggttgcaaagagttggcactactgagcgactttcgctttcactttcactggccccaggtaagcatcttcaatctccttcagtcctcagtctggtgaggaagtaactccagagatgagcagatgggcactaaggcggccaactcctgctcaggtgggtccagagtgattcagaagcctgctgccccctgccaggggcctctgaggctgggctgtgccctgtccacttcaccctccccctgtgtggcccagccctgacccgagactcacccactgcccggtttcggcacctggcccacagttagccagggctgggtcttcagtatcaacattcctctgggataaatacctttggcctcaggaatgctgggaactgggccaagaggtcaaagggcctggactttatcctgagaagctcttaaagcctcacagcacctagacgaggcaggcgtagcccagtcataaagagaaactgagagccactgatttcatccaagaaaagaaaccaggggcctccttggttatcctccataagaatcaggacagcagaagatgaaaaaaatggactcaaagcaagcaacagactggaaattccacttctgggtatttaccccaaaggagtgcctagatatgttcatctgaagatacatacaaggttgttcacagcagcattgtttataatagtctcatactaagtgaagtaagccacaaacagaaagacaaatatatgattttccttatatggggtataagtgataccccatatatcgcttatacaaatgataaaaatgaacttatttgatgaaaaaaatgatacaaatgaacttctttgcaaaaccgaaacagactcacagagaacaaactatggtcactggagggaggagttggacatcagcatgtacacactgccgtgtttaaaataaataaccaacagggacctggtgtatagcacaaagaattctgctcaatacagtaataacctaaatgagaaaagaatttgagaaagaatagatgtatatatatgggcaactaaatcactttgctttacatttcaaactaacacaacattgttaaataactataggtaggtaggtagatttagttgctaagtggtgaccgaatcttgcctgccaggttcctctgtccatgggattctccaggcaagaatactggagtgggttgccatttccttctccagggatcttcccgacccaagaattgaacctgagtctcctgcactgcagtcagattctttatcaactgtgctatgagggaagaaaactccttaatgtaattaactatagttaacataattagtgagtgaagtgaaaattgctcagtcacgtctgactctttgcaactccgtggactatacagtccatgaaattctccaggcaagaatactggagtgggtagcctttcctttctccaagggatcttcccttaactagaagttaattaactaattagaagtaaatataattaactatactccaatataaaatttaaatatatactagaatgttcatagcagcactgtttataatagtctcaaactggaaactatgcaaaagggcagcaacagtagaatgaataagtaaattgatccctggtggctcagatggtaaagaatctgcctgcaatgcaggagacctggattcaatccttgggtcaggaagatcccctggagaggggaagggcaacaaactccagtatttttgcatggagaattccacagacagaggagcctggtggggtccttggggtcaaaaagagttggatacaactgagcaactaacactttctttcttcagattgaactacaactgataaaatcatacggatgatcttacaaatgaaacaagattccatcctttaagattccgtatgtctatatctatatccatgtatatctatatatctccagttttagtggtgccagaactcagcaaagtgatttcccttgggggaatgagggcaggcagtgactgaaagggaactggaagggagcctttggagaagcagtcatgttccattttttgatatagcttcagggtgcatgggtgttcttgttttgggaaaatccttcaagttgtacatttatgatctgtacacttttctatatgaatactatgctcttgaatcttgtgttggaatcttagcgatatgccctcttctacgtatggcctcttttgtgcaacattgtatttttgacattcatccatgttgtgacatgtaacaagatttcttctttttcactgccatgtagtattctattacccgaatagaccacaatgtgttcatccattctactgttgatggaaggtgggttgtttatggtctaggagctattacaaattagtgctgctttgaccattttttgtacctgagttttgatgaataaatgtacatatttctgctaggggtatacctaggggcgggatggctagctcatagaatatatacatcttcagctaacggcaccccactccagtactcttgcctggaaaatcccatggatggaggagcctggtaggctgcattccatggggttgctaagagtcggacacgactgagcaacttcactttcacttttcactttcatgcattggaggaagaaatggcaacctactccagtgttcttgcctggagaatcccagggacagtggggcctggtgggctgcagtctatggggtcgcacagagtcggacacgactgaagcgacttagcagcagcagtaatgctttggaaggaatggtgctaaagctgaaactccagtattttgggcacttcatgagaagagttgactcattggaaaagactctgatgctgggagagattgggggcaggaggagaaggggacgactgaggatgagatggctggatggcatcaccgactcgatggacgtgagtttgagtgaactcagggagttggtgatggacagggaggcctggtgtgctgcgattcatggggtctcaaagagtcggacacaactgagtgactgaactgaattgaactgaactgaatgattttccaaaatgttttaccattttggacttccatcagctgtgtatggcagcctcatattctcactagcacaagcacaagcatgctttgtcttgtagccattcaggcaggtgtgggataatttgcatttccctgctgcctagtgaagttgagcacctgtcttagtttgggttccctaggtggcgaccctgagacaaggatttgagagcaagaagtttcttggcaggtgtgttcgtctcctaaggctgctataacaaaataccatagactggtgtcaaaacaacagacctttattttctcacagttctgaggctagaagaccaaggtcaaggtgccatccacgttcgtttctggagaggcctctcttcctgccttgcagatggttaccttctcaccgagtcctcacatggttgcttctctgtgcatgtatagagaggcggagcaatatttctggtgtgtctttctcttgccttcaatgtaaggacaccattagggcctcaggcttatgacttggtttaaaccttaattatctccctaaagacctgatcaccaaatacagtcacttgggaaggtagggagacgtgattcagtccatcatagcaggcgatcctaggaaaactcacaagggagtgaagaagtgacagcatgcgggaggaggctctggaagtgcgtgtccacaagccagttgccaccctgggcatctggagttgaatcccacggggagattctgagaaaccacgtaaaccacgccctcgagagttatcccactcagggcgccggggaggtggacttctatacatcgactcctgccggtcactggttgaggcctatttcaaagtatgggggtgtggggtgggggcggtgatgttagctccctggtgcctcccaggctcacagaagccctgaggctcggagctgcgggtacacaggccacagcacgtcctcacatgctagtaacggtcgaatcctcacttgagtgaagtggttactcttttgaagctgagttttgaaggatgtatacagatgggccaggcaggagacagcattccagcagagggaacggtgnnnnnnnnnnnnnnnnnnnnnnnnnnnnnnnnnnnnnnnnnnnnnnnnnnggtcttccagggccccccagtcctctgactctcccaaatcctgactatgtactgcaagcaccactgaatgccagaatgtctcccatagccagagacatagacgaagttcccagcagagaggctgcaagccaggtcggggccggagcaaggacaaagggaccagcgttcccagggcaacagaggctcaggccacaggatgggcatcagagaagtcaaggcagatctcaaggttgacattaacaaaggaccttgagctaaggtatggggtcctgaagccctgagaaaggcccacttatactcacccccatgccacctgagttcagactgtgctgatcctcctcagtgtcctcccaggtccgaaaagctgtgcatgtttacactgtctgcagagcctaaaccaggaaggcagagggtcagggagaggcgggcccagggctgtgggcttggatgagaaccccctaaccaccattttgacctgaggggaactgggaagtgggaacctaagacaggtctgagcaggctctgactgctctgcagagctatcagcttggagtccagccacatccagttctgtatccaaataacaggcatctcatctgcagaagtataacctggcagggcccaggcatcgtgagtatctgtcagtccagccacactttggcaagtcatgtcccccctactaatcctgctctgtgtggcttgggtggggcagtctccccacacccaggcggcgggcttgtgaaccatgcctggccaaccatgtccccacccccaggtgccgtgattgactcaaggataaacccaggaccctacccaggccaacaggagtctcccttgagacttttactagcgatgtctggaaactctctcatctgctgagatcctgagctgtaaagaagagatgggaacagctggtggacagcttgcaagatagagaaaatctgcccagaataaaagaaagaaagaaaaaaaaaaaaaaaaaaaggcaggcctagctggaagatggagagagagagaaagagtctttgtggtgtcaattaaacacctgggtgcagcatgtctgaagttcctggactcctcatttgcatgagccaacacatttcctgctgcgtttatgtttcatcatggtttctgatgcttgcagtctgaaaggatctgatgaaaatactgggtgagaacacaaccagtgttcctttctgcaccttcatatctcagagatgtgcacggagtttctttaaaaagggcctttgcgattggaatgttgcagtgaggccaagatccctgtcatgctgcccttctttgccaaatgacaactaactgactcaaagtggagtaaacactgccaacagcttacattcaagagttcaggatgctactcccactggaagacctgtcctggaaagctgccctctgcctgactccccagagtattctggaaggtgcatttttctgaccaacagtcaggattaattactttttcatttgttgaaatatgggggtcagagttatatagacttaagagagagggaagaaaatagtgcatttttgcaactccagcctgaatgggcaatattgcacgttgcacgacttgatttgtttaattcaatgaagctcgacaatccacccaaatgtgtttaaccataggggtttggttaaataaattataatatatggattaaaaaagaagtaaggtagctctgaaatataccatcataaaaatatgtctcatgtatgaagtgttaagtgcactttgcacaatcacacctcaataaagtgaagttttttcaaaaatcaatttgcccaattatatgtataacatatgcccattaaaaaataatacaacagtcctataacttgcaaaagtttgtcatttatatgattaggtgggggaggtgggcaggaaaggaaggcgaaaacaatttgcaattaaagtaactcactctccttggatgattcagtccatgccagctttagttccctatcagagctatttccccttcacaagctatttcccaagacggaaagaagtataagcttgggaggctatgaactagaaacttgggcgtctaagaactagaagctgggatgtctttaggacttcagggaagagttcctccctggcctcacatctctcttgtaagaatgcctcatcctatgggttcagagtctcagttttcatcccagctgccattacctgtgcagcaggcagagcccagggctgattttaaccttgcaaagactgtagacgctccagaagaggagtgctgatcaggatccctgcagtctggctaggacttggggacattgtgaccctgtccagggtcctgactggcaagtgacacaccagaactcagtggctttctgtgtcccctgaggggctgggaaatcaaggcaaccccttcgcatcacacaggagacaagcgtgagactagagggtaccattcctggtcttctctctgcctgaacactctgtagtggcttgaatgctgacccctcagatgatatgtccacatccgaactcctagaacttgtggatgtgaattggccaaagggtctttgcagatacggggctgccctgatagctcagttggtaaagaatccatctacaatgcgggagatcccggttcaattcctgggtcggaaagatcccctggagatgggataggctacccactccagtatcctgttattcccttgtggctcagctagtaaagaatccgcctgcaatgcaggagacctgggttcgatccctggttgggaagatccttggagaaaggaaaggctgcccactccagtattctggtctggagaattccatggactgtacagtttatggggttgaaaagagtcggacacgactagtgactttcactttctttgcagatataattaaattaggtctcaagatgagatcatcctgaattatctggtggggggaggctctaaacccaatgacaagtggcctttcaagagaaagtccaaggaagatgtgacatagaagagatgagagatgactcagaggagaagaatatgtgaagacagaggcaaagactggagtgatggagccatacaaaatgccaccaactaccagacaccagaagaggcaagtaacaggctgccccctagggccggagcatagccctgccagtactgagatttcagacttctggcctccaaaactgtgaaagaataaatttttaaaccacttgttacggcaacccaagaaactcatgcacatttcctgctctcctttctactctactgtgggtatggaccaaatagccctccagacagcatcctacagagttctagaagtgggcagaagtcccctctggggtttctagcttttctacaaccgctcccaggctggggctcagagagaagggtgaggcacaggcagcctcttggcatcactctttcctcctacgaatctgtttttccagctctctaatggctcctctgagaaatggaagctctgcctacattattccgagctgggcaggcatttcaccctgcactgcaccataaattctttctacccgtgccttacagtaaaactccatgttcagtcctccaagtttgcgcctggcatctgcaggaagtcctgggagcagacaactctgctttctctcttatagtaggtgctgctgattctctacccaccttctctttccctgctccatctctttaaaatgacccagttttcattccggagtccatcttgcccttacatcacccacgtgcttcaggtgaggctaaccccaacctcagctctgggggctgctctaactggtggcatggaatctatcccacgtggtccagaaacccaagcctgagtgccagtgcagggcacctctccggccacagaaacaggcatgcaacaccagccatgatgccaagggaaatatactgggacctgctggaaacaggtatttccttgctgttagaaggatccaccagaagggacatgttctccttttcccttggtgtcctggtggtgaatgtctggcaattctgaggggagccaaccccaggatgaagccatcagacagagcatagccaaggggctgctgagttctaggccagagttgctggattaagccagtcctgaagcccaccctgtctctggaatctggttacctgagccaatacatctcattgttgaagccactgtgtcttagacttactgttacctgcatcccaaagcatcttgccaatataccacttgccacagccagttttttaagactactgtcctgttatgggttttgagatcctattttgggagtcaaaagctaactaagcattgttccttattcctcttacattattattgtagcaatttttaatcctccctaaggcagatggatgcctctggctcaataggaggaaaattcacataaggaagcttgagaaaaaatacacgttactgtatttcaaagaaatgatccacattaccctaacattcacacaaaaaacctgggggaagaacttctaaactgtgagcaggagcagctgaagaggacttgggggatatgtgtctccctttctaggctagtatcactgtaatgtttgaatttctagagtaagcatgtattacacttgtaatttaaaatcctgaggattagagtcatctgaggcatccagaattccccaggtaccgtccatggctcagctgtcaatcctgcagaaagtttatttgtggatcagagcaatgacttaagaagaatagtcacaatgtttctttacaatttagactttttgtttcaacagcgtacactgatctagctgagtgcatgttccccgccacaggaaacccttgccaaatctgtgccaagtggtagttaacaggactttggtgtctcctggggtcaggagaggggctgcagctctgagtcagccacagtctgcctcctcccttccaccccaggatctctggcacaaagcgcccatgcctctgtgaggtctgaagggcctccttgcaaactccaatcctgtgtttatgctcctcctgcaagaaggatgccacctcctccttggacagagatgaggaccttcagtatctccagaggggtctccagactctgggggccagagaccacagcccagaccccagtgccccgagagccccctgctctgccccagggtccccgtcactccctaggggttctcttctcggcttagtcctgatgcaatctccaagctcaactggcctgtctctgtcatttcccccaagctgataaagccagaaacctcagagtgagtggaaagagcctctgccctgaccagaagaaaccgcagggctgaccccataccccacagtaagagctggagaggctgggctctgggctcaacgcctggggagaggaggaagaaagatgaaagagctgaagaaaagaccatttgctatcacccgctcacacctgtccaccactctctcttccctggatctttccctgtgcttggtccctggactctgtccctctctaaagcttctggctccaggatcagaaaaagcctcagtgcgagcctcagttctagaatctcaactctcagaaaggctagtatagggggcctcagcactcccctgcccagacatgcctggggtaggtctgggattccttcatgctcacctcctccattaagggctgggcacccactagaaggcatcctgttccccatgggtatccagaaccctcaaatgtcccaaacctcctcatccaccctcacctctgcctggatgggcagtagataccccaggtctcttgccccagtcagacccctatgcaccaggccctgtgctgggcatcaggttcagagatgaggcaggtccctgctgcaggacagtggggggcaggggacagcaggtgggccaatggccagatgaaagcagtcacagtaactgccagctgctcggcccgatgccagctggggacgtgatattgaatggtcacgagccccttccccaacaagcagttcaagttcccagcagtggtctgtacagaagccctcgccagatgcagcatcgctcagagaggtcctcctggttcgcaggatttaacaagtaacccctgctccacggtcctatcgccctctagcattacgtgctcgatttgctcttccagtcacccactcccatcactggagtgtaagctcttggaggcagtatctgggtcattcttacaccccagaccctgggatgctgtctgggcactcacagtgtatttgtgggtactggatgtgcatgaaaggtggttgctggattcttgtccctccttctaccctatcagtcacctagccaaaccacccccaagacctgcagaagctgtctcttctgttctgtcatctctcctcctcgccctccccagactctaaacccagcctccccagcccttccttggtatttcttaatctctaactgctgctgctgctaagtcgcttcagtcatgcccaactctgtgcaaccccatagatagcagcccaccaggctaccccgtccctgggattctccaggcaagaacactggagtgggttgccatttccttctccaatgcgtgaaagtgaaaagtgaaaataaagtcgctcagttgtgtctgactcatagcgaccccatggactgcagcctaccaggctcctccgtccatgggattttccaggcaagagtaatggagtgggttgccatgctttctccgcctaatctgtaagcccagttcaaacgtcacctcctctgtgaagccagctcagatccctttgtgggcacattgcctgtcacatgatcctactgggcgctgcagccacgtgtttatgtgtctgcggcccccgcccccaccaccacctccactgctgaacagaagatcttcagaactgggctggggcccaggtctctgcgtccagggcttctacagagaccagggctgggcataatatcagagctcaggaacgatctgtcagatgaataaaggagtgagtggagaaatgaatggatgagcccccgttagtgagggatacgtgaaggagcaggcggatgcatgaatgagcaagggaagaagctaccgagtgaatgagtcagtgacttggggtgggggggagggggagtgagcctgtgaaggagagagagccgtgagggtttcagtccgctccagcagccctggcagcagccagcccccgccacccctgggcctgagctccgtgccaaccagacctcccgatgcctcctcccagagccagctgccgtcagcaccgctcagcacgcgctcccgatgctggccagcccctgcgctgggccatgaatcagacagggcactgccccagggctcccaggacccggggcagacagacagcctcataaataaacccgatgccctgctgggcagacatgtgttccagcagtgcagtgagctcagggttggctctggagccggggctggcagggcagagcctgatggagaagcctgggagagcctcaggaagagggacctcagggctgggcctggaggagaaagggcacccggggcaggagggctggcagcagccaaggcacagtggcttcgacagacacaggagtgcagggggagggcgtggtggaggtgggaacatggggaacgcagggcctgagtggtggggtcaagaagttgggattggcagagccagggctggggacacagcaggatgtaagcagagtggggcacaaggactgcgggctggcggtgctgtatctcagaaggaaagatgggaggctatggggaacaggtctgtgagtttctagggcgctcagggctgtgtcctgctatagctgttgcataattgagcttctggcttctctccacaaagtcaccatcatcctcccagccctaatactcaccaccagcagcttgaggctttggagcacccaaattagggaggttactttggtgagaacacttccaagtgggtgtttttaagccaagattgttttataatggttcagatcatggggaagatcctggggtttctgaagcaaatcagggaatttcagaatttgacaggaaacctcccagttgaatgggtggaggccaccaattcaaagatgctgagcatcctacagtgcacaggacagcccttcacgacaaagaatgacctagtctaagagatcaatcgtgccatggtgttcaactctttgcaaccccatggactgtaaccctccaggctcctctgtccatgggattctccaaggaagacgactggagcgggttgccattcccttctccagaggatcttcccaactcagggatcaaaccgggtctcctgcatcacaggcagattttttacctctgagccattgggaaagcccagtgtcgaggttaagcaacctgctttcacaggtgggaggactaagacggtgaggatgctagaccaaaaggtggtctccagtaattcacgtgggtcttcatacgtgccaggagctgttctgagaacctacccccattcactcatgtcatctcttcctgctttgaggatgaagattaaagacatatgtgattttcccagggtcacacagctggtgggtggtgaaggcaggattcccacccggattgtctggcttcaaatgctgtgctcttgatcatgacatcccatggtctcccacatcacccagcagctgggacagagctgggcttgggcccagagcccccctctccaggcagatgttccttccactctgctctgggccccaggtccatgtaggagtcttgggctcctccaccaccacagacgtggagcttagcaaccgggactttgatttgtgagggatgcagtgggtgggcaggaggcagatcccagggacagagggcctttgtctgcctgcagatgggcaggggccagttgggtgcaaactcattagacagctgccgaggctgccaaggagacgggagcaattagcgggcttggctgaagccaggaagtggaagccgctctgtgagagctgctgagcctccctgccctccaccaggacccagctccctaggaggcagctgccaagtttatgttcagtttgataatggcagctccaaccatccttacaggttgaacctactatgtgctgggctaggcacattccatatcttgtcttttttcatctataatcacccccacccaccttgggaggctggaatgactaactccattgcatccacttagtcatccttccattcattcgacaggtattcatttattgggtgcctactatgtgccagctctgtgctaggtcccagagatgcagcagccaacacagcagacaaaagtctccactccagtggaccttctgttctggaaggggaagacaggcaacaacaaaaaagaaacaaacaaggtaactgcaacttgtgatcagggctatggaggaagtgaaggggctgatgggaggatgctggggataaaggaatcagggaagctctctctaaggaggtgacagttcacaggggagggacttgggctccgagaggaaaggtgacttttccaaggtcacacagctggaaggtggaggagctagggcttgcctccagccttgacctgggcacctgcctcacaggagcccctgcccctccaccaggccaccatccacagctgtgccacacactggcaccgtatctccaccccttcctcatggcagcctcatgaaattcgtggggttatcacctccatcttacaggtggagaagaggcccagagggggccttcacaaacccagggccctgcaaaggaatgacagacaaggggcttgagcgtcttttgatccccaaacctgtattccttctgccacacctccatccttcctggccaagcacttgacgcgcactgagcgtttagtaggccgataagaaacagatggatgcatggactatggggccttgggcatcatctcctttcagtgcttccatttctccattagagaaggcgagagggtccagaccagcttcaaaatgcccaagttcattctactctgttgacattccttgaggagcgtggtcccctatggagaaaaagatgaaagggactctgcctcccgcagactattctgggcggagcaaactgcaggcagaagcatggaggtgggaaaggaaatggcgaggagtcagcagacatgtttaggacgcggagagccacctggaactcatatctaagtgtccctttccttttcctgcattcttaccacctgtcacctgcatagggtcttaggccaccagagcttcatctcctctcaattccagctcttgcttgagtcccagagagtctcccagaggaggggctgaagcagatcccaaatatatctgtgccaccaactgtgcacagtgtgatcttggtcaggcagctggtcccctccctcagccttggtcttcctatcgattaactggggagacagtgatcagagcaagtcggtagcacaataaaaggtgaggtttatgagcacattctccatgtcaggcagtcatcccttgagacaggcaattttgttatccctgatgtacagataagagatctgaggcttagggaggtgaagtcactggcccagggccacacactaggaaatggctcccccgggggattcacgcccaggtccatctgatgccagagctctgctcataacaaaaagctcatatgaagcaatgccctgccctttgacccacgcaacactcaacccccaggactttactcgtaggaaataatccaagagagccaaaaacctgttcacagcgggcctatttacagtatggcagatcactggaagaaatctgcatgcccaacgacagggctctgttcactttagaaattaggcagcttcagatggactgtggcttactgagcaccagctcttgccagttgctccactgtaacccccaccctaaccctgcaaagtggatgttgctttctgcatcctgggtgaggcctccaagttcagagtgtgaaggattggctgagggctcacagccagtgttgggccagggcatgagtggtgtggccaggcctgttcacagccacaccccaggtagctctgttctacaagaaaggaagctaaggcaagtaagtgacccagtaccacacggctgataagcagagaactggagtttgaccacaggaactgggactgcatactctgggaccacttccccacactgccacctactgactgggaaactgcaggcgagtcatttaccattcccaagcctcctgggctcctcatctgtaaaatgagaataagattgtctgttgcgcatggtgtcaccatgtaagcagtggtaaagatagcaatggcaacactggtaatactgctattcacagtcgataccaccgggacagcgttctgccgtgaaaggaaaccttgcctgaacgttagaaggactggctgcaaacctcagctaggacacgtctcaactctctctgggcctcagtttctccatctgtaaaatgggggagggcacacttgagcatgtctccggctctggtggtctctgagcccaggaacactgctatctcgggttttccctgggactctgcctgctgacccctcatcacacactggtctgggggagcgggggcgggacgcagtgggtctgggcttgaggacacatgtactggaggaggacaaggggcccttggacagggaaatggaggttaagtcaggaagccccaacactcagcccctcaacacacagcccctgctcctggcctaagggccactcaggcagcatctgctctaggtcctttgtacctctgcatgggacctgcctctgccccacggcctcagtctctcccctccctgccagcccctcaaggagatgctgaaccttggtgaagagaaagcagaggaaggcaaggaaggaaaggctgaggggaccaggagaagaggagaaagcaccctgagaaggaggggtgaagagcatggttttacataatggatggtaggggtgggatgagaacgaggcttgggacggggtagggaggaagaagaagaggtcaacagaggggctgagagggtctctgacatttttcagagttccctttaccaaccctggtgaccttcgggtgccctctctttatgtcctgctgactggatacactgggagccaggcctttcacagaggtcatgccagccctgagggcaggcctcccacatggctccagccccataggcggccacacagaagggccaagggatgtttgcgggacaaaggacttggttcactctcccaaaggctctgaactgagaagaatgtagacatcatccaatccacctttcctcacctgccgccccaccccacccccaccaagggaggaaggactttctcagggctccaaggtggggatgtcgatgtcagggccagaaccggaacccagtgtcctgtgtcttgggcctttctccagcccagccctggagggtcccagcagcaggaagaatccctgcctctggttctggcttaataaccagccacgaggcggggctcagggcctgcggctcagctgccagtctccccaggttgcaagagcattaaatggcctcagtgatgcacagctttgactcctgagcaggcgaggctggtggcagagaatacactgatgtgacatctgggggctcctgggagcctgagccccggacaaacctccaccagcgtctgaggaacctcaggctctgcagagtcagtggcacagaggcccgcagcatccttggaattgaggcctggtgtggcagaaagaggagaggccagatgacccaccgagataccccagaggcagcaaagctgagagacacagccagctgcaggttaagagctttcaaaaactttcagctacagccaaagacaggagatcagtttgtaaacagacaacaaaatcccacaacaccctcagatatgtcctaactcatctctctgatgggctcagagctggagctggcctgctcagattcctcatccctttccaagaaaggggcagcctagccttggacttggagaggccaatgccttcctcaggccagttcttctattccctccccatccaaatgcatcaacaaatcccctctgggtttattttcttccctccttccctgcaggactccagcctcatcccatcagtggtgctcacccttcctcccaaaccctccctggctccccatgtcaacaaggtggcattcagactacttgacttgacattcaagtgtgatctgctctctgacctcaaaccctactgctcccctctgccccaaccatgactctcagtcttgggatgttcttgccacaggaactgcacattccaatctggtagtgggcatgcttttcctctgaatgcaggtgacccatgcgtctgccccaatcagtggggccatggtagaggggactctcaaccctaccacttcctggaagtgtgaccttggggaagggagtctcacttttctcatctgcaaaatgggaatgctgatcccttcacgggattcaaaggtctgggcacagtgcagatcacagaactattattagctattatttagctattattggattccctgatagctcagttgataaagaatccacctgcaatgcaggagaccccagtacaattcctggatcaggaagatctgctggagaagggataagctacccactccagtattcttgggcttcccttatgactcagctggtaaagaatcctcctgcaacgcgggagacctgggtttgatccctagttgggaagatcccctggaaaaggctacccactccagtattctggcctggagaattccacggactgtatagtccatgggtcgcaaagagtcagacatgactgagcgactttcactttcactttagctattatttatcaggatcagtgctgttattacttcgtgcggtcccacacagcaaacatcctaagcaccgggccactggcaggccccaagtctgtcaaactaacctcacatgataatattagaaacactcgcctccatctcaacttgcatatgtgaaactgaggcccaggggcccaaagcccagctaacagcagaacagaccagaagccacatctcctgatttccaagccagaactctttccctacaagctgccactactaaaagccgagttcagacgccaaactttaattgtgatagtctcagtttatacaagaagaaaaacctttgctccatataagaatctttattatttattctcacttttaatgccccaccttgaacattcctatgtaccttcagagaacacccccctcctcctcctcctaggcaaagctcactcctccagctgctctttctccccacctcttttctctctccatccctggggaagcctttatctgaccttccctggcggagccaaagggcaaatgctggcttgcctttttgctgctcagctaaaaagctgactgccttttctcactttctggattgtgttgttgttcttagcctcaagggtctaccctgtaagagaaaaccagaacctccctctccaaagcctttatctattcccagttcctcccatcttaaaaaacaaccagggaccagacaaagcaaaccttcttctaccctcttctccttcagtctggcccggtttcttggtggtgacctgttatctccaggctccatctccttggcttcatctcctactcgccaacccatggggttgcctctgctgtgtcttctgttcaggtctgcagcgactccatttcccccaggtgtgctgggctctgggtagccttcaatctgcctgatctgtctgcctcagtttcctctctgagcgctgtctcctgggggttgtctgacactgtctccccacagccctgccagtaacttctcaatgccctttgttgggctcctcctccatccaagccttgacattctgtcttgggtcctcttgtcttcccatgctccttcccttggcctccttataggctgaatttccatctctagccaatgattgctagagtccacctccagcccaaacttttctcctgaggcccaggcctgggcaccctgttgcctctactggatgtctcttgtctttttaatgattatttatttgtttatttggctgcactgggtcctagttgaggcatgtgagcgcttagttgcagcatgtgggatctagttccctgaccagggatcgaacccggattgattgattgatccaggggtcaagacagggatcaaactctccattgggagtgcagagtcttagtccctactgggtgtctctaaggtagcatcaaccgagcacatctcaaatcatctcatcattttcttttgtgaaacccatctcccctcccgagcccccagctctacattcagccccaccacccaccctatctttgaagttgaacacctagaagtccctgatgtgtcctctttctcacccccacacccagtctgtcaccacaccctgctcagtccatcttccagaagcctgtacaacctgtccaggcgtcctgagtccaccacctcgacctcaatccaaacactccacttctcccctagtggagagtcctaacgggtctctcaaagccacacataccctgtactgcattctcacagcagccagaggggtctttctagaacacagatctttccatgtcatttccctacttaaaactcattactgtctgccaaatgttctccagtgaaacctccagatgtttggcgtctggtcgcaccctccccacccaccccccaaacccggccagctctctgagcacaaaccactctgtcttttcagctttttctttcaatttgctgtatttcttcctgcctctgaggctttgctgttgctgttttctctgtccagaatgcttctccttcagcatccccaccaacccatccttaagagatgaggccaagggttgcttcccaccttccccccagggcctctaggatttcgacagctgccaggctgtttgcgctcacccctgggagcttgtggttgcttgattcatgtctgtctgggctcctggactgcaaatcatgaaggccaggggccatgtctgtcttgctcatcctaaaaccacactgtgccaggcccacagcatcccacagccccacctgcccaagctacccccagtccacaaagccagcattaactgccccagagaccaactccaggctggaattcaaggcctcacccttccaaaactccccatccttaacccctcacacacaccttccccatccacactggggagcctcctctctcctccctttgctcccccccatttttccttcatccttctttctctaatgatattcaagctcaccattctccaatgatgcttctgttccctgaccacacagcccatcttattttggattgacaggcatcctccctagcttcaggatgaaattacaaggcacttgaggttctccataatctggctccggcctacactctcagatctccaccacccacacaagagtaatctggcacaagaggacttagccgttaaaggattcttggcctttctggattcaagccctgcttgcacttcttacaaacttcaggatcttgagcgagtactttgctaaacccctatttcctcacatgtaagacaggaacagttaagagtctccacctcattgaattctgtagagattaaataaggaaatccacaagaagtatttagcccagcacttggcaccaagaagctccaagctcctttcctctatcatggccctaattggttaagaacctgtccttcccatgggtcctatgttcagaggggatcctgggtgcctttcatctctgtttcccctttgcctagctcagtgcctggtcccaagaaaactcaataaatgcttattaatgcatagatagaccacacacttggcacaagtcatctcattgttcttcactttcatgtgtgtaaatcttatctctcctaacagagtttgagcttcagggtatgggggaggtggtgctgggagaaggtggtgaggtgtcttcatgtcagagcatccagaatgggagggatctctaagctcttgacatccctgtaccccccatggtgcccagcctggagcagggagtcatgaaggccttgttgacagatgggcctgtcatattccccaagaagaaggcacgtctcccgctccgagatatcgccctaattactccctggtccctcccctccacacacacatcggctttcttaggcaagagcctgcttgacttacacacatggagttcttttagctggtggttctgagccagctcagccagtttcttcagaaactacagcagaaagagaggaaaggttttttaaagccatagggcacaaaaccagagtgagggatgggtgaagtttccccagcaaaaggccagcaatggaccagcattggtcagatcatctcagcactgttccaaaggcaaacctgatggcatagtagaagggttaagtgtgtcgggctctgcactcagagactctcaggtttattccaggctttggccctaaccttctgggtgacgctgcacaattgacttaccctttctaagctcagttcccttggctatagagtggggacaatgttagtactaggaggatttaattagacaagatatcaaagggttggctatcactatgattatgatgatttttgtcattattattataataccattgaatataagatccagaaggaacctcaaaggtcatgtgagaggagagaacactgcagccagcagaggtggcctgactttgctaaaacatacagcagatcagtgcttttttctttacctctttcgctgacatctttcagagaaccaagggagtttgctcacttacccctgaccttggagttggtcccctaccttgacttgaagaacacagatttgggggtcttgaagccaacaacgaccaaaaaaatgggcattgttttcaccaatgggccctcgccagttggaggtggcccagccactgctgacaccatgctataggatggagcatggcctctacttgctatccatccttgaggaagggactgtgggctgggttcactataggcacagcctggacttgggaggcaaggcactgtctgctcccccttctccagctgagttctgcactctggcctctccttagcccggcccaggggctctgcctgcccacctgcctgccaaatggaatccctgcttccacccatcccaaatgcctcttccccactgccctccctctccctgaggctgggaaagacctggctggtccatctagaggatggcactgggcagggggcaaggcttagggagctgtggaaggccgctgccccgggtcaagaaggcaggtctccagcaatcttcaagggaggtgtgctctcagggctgaaggggagcccaacagcactgggagaaaaacaaaaacaggaaggcttgccatccagtaggcagctactctctccttggctcaaattacatgtcattccagtcaatcttggcaatagctccttctccactgggtggtttgtgagggcggagtgggaagctacatccacagcagagtacctggaaagaagaagcttgtgttaggggtgcacggtgagagaggctgccagctacttctctgtcgaagtactaacagaggtgccccttagaatagaccttccttgttcaggtacatctccctcggccagggtggaggaagcacgctcctctcaactccccaaacacaaagccaggaggtccccgtggcctgacaaaggcttctactactccattggctacagagctggcctcagaagcatcagtgggcaaatatgcatggggcccaaaaagcttccatgatcagggcctgcgtggggcacgcatgctcaggcactttagtcatgtctgactctttgcaaccctatggactgcagcccgccaggctcctctgtccatgggatcctccaggcaagattactggagtgtgttgccatgcccttctccaggggatcttccttaaccaggggtcaaacccacgtctcctgctttgcaggcagattctttaccaacgagccatcagggaaacccttctatgatcagcactgtgtcttaaaagttgggataacccattgtctagaaaagactccaaatagctggtcccctctccatgagggaagggagggtctgaaaggaggaccagattcagcacaatgtctgggattttggtaggagagctggttctggcttcccaagtggctgaagtagaagcctctcttggcctggcatggtggtttgctttgaggccaatggctaagaaagtgctaaccttggacccaaagtgcagagatcgcaggagcacaggctccactgaaaaggagaacaagggtccgtgaagctgagcagagcacgtcttccacagcgcccccattgtcagcagcagcagttagcactgatggcctggtgaggactagtttctctcttcctgacactggaagtaggagtcttctcttgggacagagaaaccttctgggtctttctggacaagggacggcaatggcttcagtcaggagacactgaacttccattaaattccacaggcagatatttgagcaattaactggaaaatgaagacttgagaccagtcctcccaaactagtgaggtgcatggttctggttattgcatagaacttgactatctcgttggttcctcataacagctcaacaagcaggcataattatacccactaaatatatgagaaaattgaggttccaaggagtcaaagacacgtgccagttcactcagctgggaagtgttggacctgggactggaatgatctctgctcagtgccccacgagattgaacagaaacctgaggacccagggccagcgcttctcatactgactctttcctatccttcagattacagtttaaccatctcctcctcaaagaggccgctgagccccagaacctgcagtgtgttccccccaccccatgacatctatacatctggacaatatttcttcctttcttagaatattatcataatgatcataacctcatttttacttgtggttttaaaatctctttgatctgcttctctctggagaatgttttccccacgagacagcacataatgtgcagtgtgcaccactgagccccaggcccagcacagggccgagcacatggtggaaccctgtatattgtttgaaggaatcattgagtagatggttaacgggtacttgaaagcatgtcctctttggatggcatgaaaaatcaagatgatcataagagagaggagaaaatccaggagagacacaagaccccatctccaaattctaaagggctgtcctgtaactataggaacaggtggggtgggaggcacaaaactggggttgctggaaagcaggactctcaatggttagggaaactgagcccctttcgaggctcctgccctgtataagcacaccctgaccatctatcccttcctgccccacctgggaaggactccagccatagctaaaggaggcttgtcaggcctgagtggtggctgctcagggactcaaagcaaagcaggttgttggggcgggctccaaggaggaggtgagctgcagggcttcctgggggattatcaggagcaaggatctctgggcagagacatgggtctgtctgctgaaacttgctcagagcagcttctgggcttcctggtcagataattgcaaacaaaatagaccagggactgggcagcagctacaaacccctcttatataagagaagggcctgggctgaggcatgcaggagcaggcagcagggccctgagtcatacaaggaacgagacccattcagaacagctaagattctggcctcagaagctttcagtgatgatgctggtggctttgcctttctctggccgcaggcttcccatttgcaaactgagaaccactggacatccactctgtacctggccagcactggggagaaggaggcattgacactacctcccagacacccaggaaggagcaccaactgacacactctggttcagacccggggtcagggaaaggcagtggggtagggggatcagcagagtacttccagaaagaaggtggaggacccatgctttaagctctttctctgtccctcttaaggaaactctgaccacccagaagagactggaaggtggccaagaaggatctagccgcaactggccagcagtacctgggactcaggtgcctgggtttcctcggggaagtgcacatttatgctcatttgtattatgctgcaatgtacatatatatatatgcaaatcacatatttgtgtgtttgtgtatgtgaatctctatactcctctgtgtgtgtttgcttctaactaggtttaattccaactctatgtgcccatgcatatgtgtgtgcccttgtatgtttctaggtatacacaggagtccaagtgattacgtaagttatacacatttattcattccagatatttatagggtgcccattacatgctacgtgttgtcctagggctgagaatgcagaggaaaaaattcaaggtctctttcctcatgtagtttgcctgcagcataaaagataagcaataaatgagggaataaacaaatgaataaataattgcagattgtgatcacttacatgaaagggaaaaaagcaggataattagagagtgacttgactttacataaagaggttaggaaagacagcttggaaatacagaaactcaggcctcaaacaagacctcctaattcagaatctgcattttaacaaggtccttagagggtctgcatgcacatcagacattaagaaactctcattaacatacacatgacatggaggacaaagggaatagaggcaaatgccacagatctccttctgctgctcgccatgagataatagttgggattcattgatcagtttccttcttccctgggcagaattctttgcccacaaaaatcactcaaggatctgaaaccttggaggccccgcccaactaaggctaccgcagtcttcagctgttgctgttcagtcatgtccaaccctttgtgaccccatggacttcagtaagccaggcttactgtctttcactggcgttccctgtctttctctacctcctggagtttgctcaaactcatgtccattgaatcagtgatgcagtcttcagttaacttttagcctaagacattttccacctctgttactcactgcccccactgagaatcagaaagctgatttccccatgacagaatcagtaaccccagtcacactgaaacccccttttctactagcttgcccaaagacataaggagttttcaatggtcagctggcgttcttaacttccacttgaatgcaaatattcttgcatcctctagtggaaacattccttccttgggcaccaaaacttctgaccccaagtttgaggggcaggtccttaggtgggattgtaggcactgccactgctccttctgctgctcagcccctggccctgtattccagctctgggagaaatagtaccatgtatagccagctgattaagagtgaatacagcatcttataggatgccccttccccaccaccaacatcacagtgtcttttaattccctttggctctgggacctagatttttattaggtcatttcataattttataggtccattgatttcttggtaatggggtacccgggatgaccaatggatccaattatcttcagtccattggcttactcctctccctgtaaaatggatttcttgatctacagcaatgttgtatgggatatcaagacagtggatgaggtattcatagagtctgcagatggttctgctggaagaattatggcaggcaggggaagcagatccaaatccagagtaagtagctgttccaatgaagaaaaattgctgttcctcccatgaaggaaagaatctgatgtcgtctccccctgaccacgtgacagccacagctgctttgtcactgagtccactgagcaagccctggggtgaccaggaaaagacaccaacaggcatccacaggaggtcatcttgaccacctgtttcttaaagccctttcttccagggtcttcaggtttcattcgagtgagtgttcttataggacacaagtaaactcgtgatgttggatccattctgagggtccaatcacatgccttttctccaagcttctctttcaccaacccttcagtcctgtctcttcccagtccctgtccctctgaccaaatcattagccacttcccatacatcactgtagaacataaacctctgttcttccagaccgagacagtgagacacaccaaagtgctgctcactgcggggatttctctattctgtcctccagggatacctctaaatggggctgtaattacacagcctcacactctactagcataacacgcagagccatttgttaagcaggctcagaatgcttttctcctccatacatgggctatagggaattcctgtgagagcgtaagtgtctgctgagaaagatgcagtatccagcaggtgtgagccacctcttatgcaacatgcttgtgctttcaggacctgcttgggtccagaccactttaccacctccactgaaggagggagtactgttgggtgtgctcagtttaatgggtaggtggacctgataacacagttgttctcttggactaaacgattgcatcatagtctatgctcaggtggttagcctctgttagtgccaaggggcaagccaagagtcatttctcaagaggtgaacatttgccagagaaggcatggtcttgctccaaaaatgaagcatctccagccatgatgctgctctctggtcttgccaaaagactccatgcagcatctcaatctgccacaaactttcagtacctttgaatctagtatattataaaaacttggcttgaagtcttaactagctcagatcccatttaaagccaacagcttttttgctcactcaggagctggcttgaagtagaagacacaagtgtggtagatgttgcctctaaaacccaaagcagcccaccgagtgataagtccctttcttagtgatctgcgatgtagagtgtcacagcctattcttcactttgaaggggatattctgaatttcccaggctgatattttcccagaagcttaattgagttccctgtattttctcagactatttttccttcaccatgcctctccaaatacaattgtatttcaagatacttattatcttatgatctctgtgtcctacgagtaagatatcaccaggacgtctctggcagtccagtggttaagactctgcttccactgcagggggtatgggttccatccctggttagggaactaaaatcccacatgatgcactgggcagccaaaaaatcaccagtgttctagatgaatgatgaaaagatcgatgtccctatgaactaactcgttagagggccagacgtgaaattagagttgacacagcatcatggcgaagtgggaggtgcactgctgttctgcctcgagaagtctacacacttttgatgtcctctgattattaccatagaggagtgaaagtattctctgagtgttaggtttgcattaatttgttatagccacaaaaccatacttgaagcatcatgggactataattggagttaccaatatatattaatgataacaatcccacgttaatttttaagacttatctatcttacgcattggtcaaactagaaaattttgaccttagccttaagctttgtggtcccaccaaagaagtgtcattgcactgacttactactttgatgttgtttgaaaacctacagtggctttcacttaggctccatgggtcagggagccagtgtagtaaatctgccaattctggggttgtctattctaactatacacttggaatctgggtaaataaccacagatagtactgctgtgtggtatggaagaggctcagatcaacattccaaattaaaaagtttatcttatccaaataaatccctaatctaatcaggtcagtctctggggtaactgatttctttagaaatactggagtgggttacccttttgttctccaggggatcttcccaacccagggatcgaacccgggtctcctgcattggaggcagaagctttaacctctgagccaccagggaagccccttcattcagggctagtatctactaattctcaaaatatctagggtctttgcctgtactctgttaccttgaaacatgaccacatatccctttggggaaggacaagagaagttttaaggaattaaattattacccaatgtgttattacatagtgtttcttcaagggggtcccctcctcttttatacaacagactgtttctgcttattgactaggggaggttctgaaaattttccattgtgatagttcagcttattttctactcataagatgcatgtctattttattatatgaatcaatatagggcttttgtgggctctccacctcttctggccttaaacccatgatcattaaccatgtccaaaaaataaagagtgccctgttgtttgaaccattccaattaccacgaggctctgctcactatgacggtcacacacccagcctctaacctcgaagtgccaccacatggtctctgccacactacgatcctcccatttccattgacaccagggacccattcagctatggcaggctctgccaggatgcctagctcacagagcacagccattga

SEQ ID NO: 48 - DNA, 86405 bp, Bos taurus
  unsure (332)..(383): sequence is unknown
  misc_feature (333)..(382): n is a, c, g, or t
  unsure (55059)..(55110): sequence is unknown
  misc_feature (55060)..(55109): n is a, c, g, or t
  unsure (60703)..(60754): sequence is unknown
  misc_feature (60704)..(60753): n is a, c, g, or t
cctgtgggctggcctagcagtatcctcagccagaaggacatcctcagcacccactcccatgctagttcatgggctgggtccctgctctcatcccagcatttgaaatggtcagtaatcctgtcaccagctcctgggcccagggttaaatcagaaaaacttttgcatatgacttgtcttttaatctccttttgtttttttaaccagcatctcacttcctcattataccctctgtccgctcacagcccctcacccaccctacccggctcctctgtacatcgtgcacggcggccgtggctgcacccctgacctgagcacgcgggcagagtgatgtcnnnnnnnnnnnnnnnnnnnnnnnnnnnnnnnnnnnnnnnnnnnnnnnnnntccctcctccccctcccccctgcccaccttcccctccctcccctggcccccttgcccgccctccccctcctttctgtcctccttgcctctgctccccctccccttctccttcctcaccctcttcctcaccctcttctccagtcttcccaaatacaaagagacaaaggctaagttcacggaacgatggcacccacgcccctccttcttacagcacgcgcctggagccagagcacttgagcattgctgactgtcacgcaggtagagcacccggcacccggtgggtgctcagtgaatgtatggtggttacattaatacacgagtattatagtcaacatcgattgagcatccacctgtcaggcatactctagacacgtgccgtggttatcttggcaaaccctcacaatgacgcagtgaggtacatacttttatatgctccacacccacactcacacctccacactctggacatgggcttggtgctcaggtcttttagagctaggggctttcaagagacccaaagccaggcagacctgacagccccctatcacctctcaatcccaccccacgtcccagcaccacaccccagcctcagtcccccagtagcaagagtagagccatattagggccagtttctgtgaacacaaggcagagtggaaggtgagtccaagtcagcatgtctggccgggccctgtcgggcctcagcatccaagaaggaggccagagcagctcttgggggtagataagcaaccagagatattcttctgcagtgagcaaacctttggccagatcccctaaaatcagggtcaagagagtgtgaaaaagcgaggtgtgtgttcctgtgtcttgtttctttctgtttatctgatttgggaatgtatgtgcagtcttaaaaacaagttagatcatatttccttttaggtgaaatgaatcagctttattgaacagaatacactgaactcagagctgtggcctccaaaatgagaatgtggggttactgagttgatcaagaaagcacgtcaagccatttacagatgtcttattaagtcctcataactgtggtagaaactggtgtcactcctttttaaactgaagacatttattaaagctcaaacaggttatggaagttgtctgaggtcaggcaaaaaccactccatgtggctccatgccactccagtgcctggggggctggacaggggagctgcacccaagcccagagccctgcctgggtgggaggcagggtgtgttcactagcaccgcaccaggggtccactgggcaagttcagcttcattttcccagtgaggccgaaaatgatgaccagatgaccttgtttgagaatgcctgaaatcagtgcagtcgttctagaaataattcctgccagcaccagccctattctaagtcctactctaggtactagaggttcttcaatgcatgaaatatagttcctgtcctcaggaagcctgcattctagaggggagccgggtagtgaacaaatgtggaatagggcaagggccttgagtatgaaataaagcatccatgacaggtagggaagtgtggggagtggcctctctgtttaggtgatgtgagccgcgaacatgaggcagggggtcaggaagccacgtggagcctggggaagggctctctctgcaggtggaacagcgggtgcagagcccctgaggacaagagttgggaagtcagagacagctgcggctgtgaaggtcaagggatgggtttagccgcctgctggagcgactgccctgactctgtacgcagaggatggccggtagggggcgcggctggaggcagtgatgcaggctgagcacgtgttggactggggggggcggagggaggtgaagaaacgtgctgttaggttttgctgacacatcagggcgggggcaggtggagggtgaacgcatgagaataaaagatccaaggatggtttccgaggtttatggcctaggaaactggaaggatggagttgccatttcccgtgatgatgaagattcagggaggagcttgtctgttagacgcgaagtggttgggaggtggccaggccggcgccgcagccccgcccctgagggtgaggaggttgagcaccagcgccaccgtgtggccagacctccccagcgccccggcgcgcttcgttccacccgtcccttggctccagagaggcgggactttgtggagattgacagtgaggggtattaggaattattgatcggcaggggcctcccgtagagctctgcaagagcccagatgtggggggcctggcgaaccttgtgctgggcacgggaatcttggattccgtcactcctgagttgggtgcctagggcagggcaccagccctctgtccctcagcgtcttcatctgttacagactttaggatctttcctgccgaatatcaggagccgctgatcctgactccctgactggtagcactacccctctgaccttcaactgcagcatgagatgctggccgtgctgcctgtgtgttgaggttgtggggtacttggggtgagaagagctgaggtttattgggtacttactaggtgtcagaccctcacaatcctctcagcagcttcatgaggtggcttttattattcttacccccacccccaccattttacagacaaggaaactgaacccagagagaaaaagtaaattattcgacattgcacagtaaggaaggggtgggactgagattcaaacccagaccatttcctgcttctcagtgcataaaaacatttttaaactggcagtgtaatgatgtaggggttataaaccttagtcctgactcagccattactttctgggtgaccttggggaaacatttgcctgctctgggcatgggtttccccacaggttgatgagaggtgaggctaggtgaactcctggagctaaagtcttagggcaaagctttagggtatgttttgcctccccctcacgacccctgctctgtggtccccagccccttccgcctctctggtcattctgctcccagctgccaggaggtcatgcccttggcctcccttcacctgacagctccaccccgcagttttttatctacatcctcttgcatgcccgactgtcatccatttgctgagtgctgagctgtttgaaagcacaaatgctgggctttctggtcccggtgcagcttggcatagtggggtccagagaagcatggttgtaccagtgacctgagtcagctcatgtgtccagctctcttagttagtagttgagtggatgctgacatgagcgtagtgttgggccagcaggacccaaaccctcaggatcctgccaggtgggcgagatgttagcggagctctccccagagtcctgattgctgccaacttcagagatgcccaaactaggtctgtgtcctgttagagctgaccccgctggtggggctgccccagcagaagtcagaccaggaggctggtatttcagagctctactctcctccccagctgggagcaccaggggttctacaagcaccttctctggacatgagtggctgggaagaggccctctccgcaggctgaggtcagcttagccaaaccttccaagggaacagggcctgccacctgccagatgctattgtgccaggcatcagcagcgtggccacagtggcaggtgtgtatgtgaactgaccgtgcccagtgctgctggccccgccagcatggctgctgtattccagaataatagatgtctccatgaatgcgctgagtggctacagttattaatatttgagcccttgatatgtgccaggcttgtgtttcctcctcctagcaaaccttatgagatgagactgtcatattcatttgacaaagatggagacagaggcccagcagagtgacttaacttgctcttggtgaagccaggactgaatactaaccaaaaagaaaaagaaagggaaggcctgtcttgtttgctgtggtttgatgccagccttactacttactttgcctgggcaaggtaaggtgaactgtctcatcttagttccctgtctgtaacatgaagataggaatagtgcctaccgggcaggattatttgtggattaggtgaattaacgcacatgcaggccctagagctgaaccttaacatggtagatacgaagtcatttttgctgtttacaaagtgctcccataccctcaacgatcttggccgtcaggcggggtttgtggcacagagcagcgtggggtgcggctgtaacctcgggcctcctgtgtctgtccctcaggaaccagtgatgacccattccaggactcggaagggcgagagggcgcagaggccgtggcagagcaccagttttcagacctggacgactcggactcggactcggacctggacgaagacgaggatgaggacgaggaggagagccaggacgagccatcaggcccgtcctcggaggcgcccccacctggcccgccagccacgctgcccgcagactcctcacccgttcagggccctcagcccacagaggccacccggggcagctcggtctcagaagccgagcgctcggcacccagcagctgctccacatccagccaaagcatcctgtgcctcccccggctggcaccggccccccggggcccagtggagaaggacacaggctcggccctgagctcccaggccctgtccccaaggaggccgtggtccccaagcaaagaagcaggcagccacctaccactcaccccaaaacactcactaaccaaaagctactcgtctccccagcgacattcaccggcccgagagccactggcctcagccccgagtccgcctggctcccagacgggccctctcccctgcgggtccccgagactcgagctgtcgcctcttgccctccaccccctgggaagggaactgccacttcgagcgcgcctgccccccgaacgcaagggcgctgcagacccaggcccccccagacactcgcccaccaggagatggtctccaggccaggccgagtcaccaccacggtcagcgctgccagggaagtgggccttggcagggccgggcagccccttggcggccgagcgtggcccaggctcagggctggccccccgggctctctacccgcccgcgcctctacctcacaagcttctcggcagaagcccagcggagacctgcacctccacatgggtgagttcctgtcccccaagtggctgatgggtggggggccgcgagctcacacctccctgagcgtcacacccagagctggacccctgccagttcagcggttaccaataaggcgtgcattgggcaccacttacacaggcactgtgctgggtgcctgaaaccagtcagctgtgtgtcagaagcagcggagcatggactgtggagctggactaaaagaaagtgaaagtggaagtgttagttgcacagtcatgtccaactctatggactgtagccggccagactcctctgtccatggaattcttcaggcaaaaatactgaaatgggttgccatgcccttctccagaggatcttcccatccctgggatcgaatccaggtcttcagcatcacaggcagattctttaccatctgagccaccagggactacctgatagtttttaaattctggactacccagaattaaatccgggttctgtcacttacgagccgtgtggctttagatgtggtataaacactcatgccatctcctcccaccccatttccacgtattctttgagcagatggcagagcccaacccaaatctccacatctccaacatgactgccaccagcaccctccgagtcacttgagccagctccttcccatcttcccatcagcaccgtcactgtcacatcatcagtgccatctgccatcagtacactccagccaccccataggcttgatcaccgtggtcacaacatcactgccaccaccacggtcacgatccccagcactgacacgttatcatcatcggcttacttttcctctcccaacaccttttctgtcactggagtgtcacgacccaacatctctgctcaccgccagcagtgtcagcaccatcactcaagcgattcaagctccaggagtagtaccatccaggaatcttaacttggtttttaatttggggctcaagttaaaattcctggtggtgaaaaagtgaaagtcgctcagttgtatccgactctttgtgactccatggactgtgtagaattctccaggccagaatactggagtgggtagcctttcccttcaggggatcttcccgacccagggatcgaacccaggtctcccgcattgcaggcggattcttggtggtgggaggaggttaagagcctggggtgggaactcatgttcaagggtaaagttgggtcagtattgtctgaggaacaagagaggcagcagaagcaagagagagggccagcgcacagaagccaacagaaggggcagctccattctctgaaaacgaacgcgctggccagaagcgtggggaccttggttcctgagtgtgcctatggccactatagggctggagatggcccattccagagagggcacccacccagggtgccaccgttggcaagggttgggactcaatggtggcccagctcagctaggacctgctctgtgatctcgccaagccccctcctcactctagtcctcagggtctccaggtgcccagcaggtaaccctcgccttcctctgtcttcttttctgaccctagcagaaggccgagtcgccaagtccgtcctgttcacctgctcccgctcatcctctcttctcccgacccttctcggccccccatgacttccacggccacagcccggcccggacggagaacatcttcagccacctgcctctgcactcccagcgcttgacccgcgccccgtgccccctgattcccatcggcggaatccagatggtgcaggcccggccgggggcccaccctatcctgctccccgggcccagcgcggcctgggtcagcggtttctcggggggcggaagcgacctgacagggtcccgggaggcccaggagcgaggccgctggagccccaccgagagctcgtcagcctccgtgtcccccgtggccaaggtctccaaattcacactctcctcggagctggaggccagggactaccccacggagagggggaggacgagagggggcctgggcagacctcccgactgggagccccgtgcggcccaagtgcccacagagcccacgccgacgcacagcccccgcacccccccagagacctcaccccgggcacccccaggccaccgggcagagtcccggagcccccacctggagtcaccgcgggtgccggccaaccctgcggcctccgccaccccgccgctggaccgcagcagttccgtgggctgcctggccgagaccgctgctcgcttcccagcccggaggaggaacctctctggggaacccaggaccagtcagggctccccccagccctcgggaagtggggggtccgggacacctccacaccagcccgaggagcgggggccccggagcacttagcctctccctgaccacttcagcatctggtttctggtgtttggcaacagacgtttccagccgacttcctcgagtcatcttgctgtcacgggctccctgtcccatctgttgatctttccaagcagcttctgctcagcccccatctgtcttatcttcccacctcgtatgcagttacctgtgcctttttctatgaccttttgttgcttgaaaagaaacaacacacacacagacataaaaaaaaaaaatcccacgaggagactgaggctgtgaatatttagatgggacctcaccctgggccactgcgatcagcagccccccacaaagctggcaagaggcagtcagttgctgaaagaaaggggatgcactgagggagagacagagaaaaaaaaagaaacttttaaaaatatataagtaaatgtaaaagcaagcactcctatgtacagagtttatggttcctatttattgctgcttcatcccaccccagctagtggcctcccctggctgctagcagaagggtcagcggcccaaggcagagggacaggctgggagactccatgggcaggcccagaaaactccaactttccttttccaaagataaggtaaattttcctaggatttcaacacaaactgtttggagcaggtagaaggtagttgctggttgggtccccagggctcgcagacaccctggtggtctgactcgtgaccccattctggcatttgactcatagacaaatccccccaccccggcacctctactctgcactctgccctcaacctttggactggggaaggagccctgaccacccatctcccggttcctgagcacctgacctcggccttgctctcagggccccagccattgctgcgcctttgttctagtaactacccacaaggctgaagggacaaggcctaacccctgggggtcaagatccaaggtgcattgccttgccattcccaaggccaggcttgggcttcatttcacatttggtccctggggtacaaagggctctatttcctccatgactgggcttttccggtacttagcactggaagtttccaaggactcatttctggacctctttgcagcaggaccagtcctcctattggcgtgtcacacactgtcaggcctctactatccccaggaagtacccagaaccatgactggtgggaactgcccaggcctcctattggttggcttaaatctcttttaaaaaataaaattatatatgtgtatatatacatatatatacatacatatatatatatatatatatatatatatatatatatatatatatatatatagaaagagaatggtgtttgatatttcccctagcctcctattgtccgaggtcatttcaattcttctccaaagcaatcaagaataactagtgcctcatttctcatccccatctcctcctttaagaagctgccctgtgttttctggggcaaaagcctgctttgtaaaaaataataataaatagtaataacatgactagaaattaaaatcccaagttgaaatatagaacttgaactctagcatgtttacccagccctgggatatgtggggttttccccaacctccagaaattcttttcttttgtctctaccagggggagaaagcacaaggaccgtggtcacagcccagccaggctaggtgctaatgccgcagagcagggacctccttggccggtcctcattcctcagccaggctgtatgaatcctgtggccagagggggctcctgggctgttgaagttgcttagacaggacaccataaggtgcagagggctacaccatgcagaggcacctctgtgggctcctacccttgggcgtaattccctcttccaccagttcaggacttttccttccttggactctgctgccaggacaaactagccaggccacctggttcatttccctctggctaagacaaaaaggggacaatagggatgggcttccctgggagggggtggctgggccccagggtgctgaggctagggttaaccagcacttcctggctgcctgacccagggtctgaagctcttggtccccctggaagaaggctaacaagcccagccttggctatgctggcacttgtgggtcctggcagaaagctggaaggagccccggaccccagtcacagccttggccagaggctgggtttttcctcacccttgctttccaaccttaccccagggcaaaggtgagggacatgggaaggtggctgcctaaggactggagacttcaagggccgaggcctgggagctgaataaagggcattgcttcagcccaggcttgaaatcttcctgggcaagatcttccagctcccaacctacagagcagcaaacagggggctctgctagagtagcccctgaccttgggggtagccaggcccctcctccaagccctgccccacagctctccccggggcatcattcctctggtactcagacagcccaactactaaggtttccttcctggagccctagtcatggctggtggtggtcagcaggggagagtcaggcacaggcagaggggatgggggccaggagtcaccagagacccatttctcaatgacagacacaatgtgcaagcaatctggccaaaaggttgttgccctgcacaggcatccagagaaatggacttgatgccacccgcctgggctgtatgtcactgggcatggctctcaccctctctgcctcactcaactcctgctcccccaaacacagagctcccagcccgcacgcacacctgcatgataagggaaagactctcacatcacaccctcctcctgccctgctcccagccactttcacatttccagcctgcctgtgacactgttgtccctgttaagggacacagtggagaaagcagtgcccattgttggcacagacacctgtgcctgttctgctgaaatgtgcaggacagtcattcctgggtacaggctggctctggtcctcgggtgttggcagccttgcgggctggagaccaacttgctggggtttcagagccagctcttgtcatggggattccaagccagccggcccccagttctaccctccaggatgcccttcaccctcaggacaagctcagggtcattctgggcactaacctgttcctctccaaggcaccttttacaagcctacttcccctgccccaccacccaccaaggccccgactactaagaccctccaggaagtcaacagcagcgaactgcccactctcccacctccatcacctccaacttccagacccagcagtcccttcacctctctctgtgttaacaagtctgaaagatttaatttctgggtccaggtagcccctgctccatcctcacccaacccttttgaataagaataatcaagataactaagctgaattgctttctagtcctttctccagacaaaacctcttcaaaataaaagtcctgcctggacagtcgtccttggagacagatctgcagcactgaccaaggggagaaagttcccaaagacctgttccaccaattctgctcctgagtcgtgaatcctgtctgctttccatcagaaaactgcttcggcacttatgatcactttactaagcctagtgttaaaaaaggaagagaaaagaaacagaaaaaagaaatgtataggcaaatgtaagataacacgctctctgtaagatagaaatttgccttttttttttttttccctaaaaggtgtatgtattctgtatgtgaaattgtctgtagagagtttctatgttcttaaatggcaatacattccaaaaatcgtactgtagatatgtacagcaaccacactgggatggggtagttttgcctgtaactttatttaaactccagtttctctacttgcatcttgcaatgtcggtatggtatatatatcagtgcaaaaggaaaaaacaaaaactcccacaggtctaaagcacagagtctgatgtacaaaaagaaaatactgctcagtattgatgtgtgacctttgttgtaaattacatctgtactgtgaatgagaagtttttacaagtataataattgcctttattatagctctggctgagtgttcagcctgaggatattttttaaaaaaaaaacagcacgttggaataaatttgaaaatcccaacagaggcctgcttgcccggctcatgatttttcttagggctgtagaatgtcagagctggaaggacactccgagtcccaagtgctttttctgctacagagaaatcagggccagggaaggcgagtggccaggccatagtcacatagcctgggattccaagggcccggcccttccaggcttggcaggaggcacgggtacatggccatgtggtttggggtctgtattcatttcctagggctgctggatcaaatgaacaaactaaatggcttaaaacagcagaaatgtgttctctcacatttctggaggccagaggtctgaaaccaaggttcctggggaggctctgagggaggatctgggccagacctctgtcctcacttctgggggctgcaggccatccttggcctttggtttgtcatcacagcactctcgtctctgcctctgccttcgttctcgctgccttctctgtgtgctgtctaagggtcctcatcactggacttggggaacacgctcattcaatatgatctcatctctagatctttaactgaagtatatctgcgaacactccttttctgaaggaggtcacacttacatgttccagggtttaggacatggacttacctttgaggggccaccactgagcccctcaaggtaagacctggaatctgatcgtgacagttattcactgcctgtgtgacactgcgcaagttacacaacctctctgggcttctgtttcctgttctgtgaagtggagggtttcctgtgaggattaaatgagagagtatatgtgctaagtgctaaatcacttcagtcgtttccgacttggcgacactgtggactgtatagctcaccaggctccaccatccatggggatcccccaggcaagaatactggagtgggttgctatgccgtcctccaggggatctttctgacccagggatcaaacctgcggctcttatgtctctggcattggcaggcaggttctttaccactagcaccacctgggaagcatgcatacagcatggttaacagaaccttgaatatggtacggcgtcaacaagtgtcctctgagcagacctcacacagggtgctgtggttacaaggatgaaaaagtcaggtataggtccccaccttttgtatgcaacaatgacttgctctgcaccaggcagggactaatcatcagatacaacagtgagcaaatcagacagccctgccttcagagaactttcattctaatgggagaggccgtccttaagcaaataacgacatcatcaattcctcagtcccagtggccgtagttgttgctacaggagagaacaaagctctcacacagagtaagtcctaaaactcctgtgggctctggagcctgggtgggttgtggggagggctgcaggtggaggtggagtggaggggaagccatgataggagcagacagaagaagaggtacgtggacaaatcaagagaggccttcggggtaaaatgctggacacaagtttagcactaagaacctaagagggcctgcttgtttcagcggcaggaggatcattgctgacttggggaaaagccggcctgttccagcgcccagtctgcaggcccttcgtaaacactgccagtgctgaatggattgtggaggcagggggtggaggctggagagtgaggagaagagggaagtggggacggcagacccagacatcctccccaggacctgaggggagggcaggggagagctgggcagcagctggagggcagcaaggcgtccagggaagaacggagatgggaatgaggtggtgagaccccagcctgcttcattaggaggagatgtaagtaccagatgcagaaatttcccccagtgtgacccaagggaagaggtgcaagtgataacagtgaccggaagttgagaacatttccgccacggaattttctctgtcacctgctgagaagggaagaggaagctccagtatggggtagggggtgcggagcgggggtggtgtggactaaagacttgagaaagaaaaggttggaaattgtctttgttcattattccagaggcaggacagttgtggatgaaggcagtgtggaccacacaggcgtgggtgctgggcacaagagatgaaaaggctgggaagcgagtatccatggtgccagtgacctgaatgttcatctctgctgaccacagggctggactggaaacccaggctgtgagctaggcttcataatccaggatatgggctgtcacgctgcagaaacaagcaagccagaaactccagaactgaaaacaatgaaagttgaactttcccctctgccatctgtcccatgtgggtcagcagctgaagtgtactcatcctcatcatttggagacctaggctgctggacgctttatcccgtgttcctgtgacctcagaggcagaagaaaggagagagctgtgaaatgttgcattgacagctaaatgctctacatgggaaaagacatctctcctttcaaatttcacctgccaaagcagatcatattgctgtgcctagtgacagagatgaggaatatgtgtgacagtcacacaaggatacgacttcccagtgtcagaaacacccaagggctgagcagatgtcaatgatgggatgggggcagggacagggcctcatggcatcggcctcaaaggtgctgggtttttacagggagtgaaaaaaataatggtgtgcaaggaggcctggaagaaaatggcccctggcattttgatcatggggtgtggaaggcaaggagcagctgtctgggagcgagtccttggggagatcctgaatttcagtcgagaccagtgggaaagtggaatcccaaaaaggcccaggagaagaagagcacagaatggagccaagtccggcctccagcattttacaagccctatttatagtccttgggcttccttggtggctcagtgaaggaagccacctgccaaggcaggagagataggttcaattcctgggtcgggaagaacacttggaataggaaatggcaacccactccagtattcttgcctaggaaatcccatggccagaggagcctggagggctacagtccatggggtctcgaaagagtcagacatgactgactaaaaacaacaatgtatagttcccaacgacaacccagggagatgagacttacggtccccatttttagagaagaaagtggaagttccaaagagcccccaccaaggacttcctgctaagactctgtgctcccaatgcaaggggtttcagatttgacccctgttcagggaactagatctcacacgccccagctgagagtctccacgccacaacgaaagattccacatgtcataactaaagatccgacaagctgcaaagaagatccaggatcctgagcagatcctggaaagatccactttccaagttacaacaaagactcggtgcagccaaatgaatacaaataaagaaagaaagaaatattaaaaacaaaaggacccccaccagccaaagatgcagggctggttagaggctgtgtgagactgactctagcctgactctggtgcagcgcctctgggagccccaagttcctccctctcatctcctccctgtgctctggccccaggggagccctggatctcagactcttcacctccttctccccaggaacccaggggaagaggcaggcccaggccaaggcttcttcccagcagctgcctggcttctcgcagccatccaggatagccccgtgtgtccccgtgtctgaggctgaaggcgcagggatggaccatcagactcaggggctgggattccagtgctcgagagcatgccaagtgcatgcaaactctctgaagaacctgactccccagcctgctgctggcacccaggcccacctgtcactcacaccaagcctcccatggcctctcgtattcacgaggcaatttcccttttggagtgagggagatagggcacctacttccacttcacagaagaatagatcccaagattgcaccctggcaagtggcagggccaccgacccgggtcacacctgacccagaacctcaggaaggcttgggctgagccttgccactgcccatcagggctgggccttctccctaggcctagaccctctctgggcttaagacctagagaccatgcttactcctagagattcccagggacaaaccacggctggcaggatggcctcagaaggcaggccagcctgagatgggcatgagcagggagaaacaggaagcaaaaagagtcaaataaggatgggggcgactgaggagggagcagcccagggctgccctgcgtgggactcatcactgccatctggcccggggagagacttatcacctcgtcactttgtagaggaggaaggctggggcttggacaggtgatgctgctcataaggccacagtggtcaggggcagagcagagacttaaaaccaggcccacacattcagggagtggttgggactatggaaagggaatctgggcctcttggctacctcttagtcctgaaatctgggttgggggaccccagcagacatatcctttaattccatccagcctcagccactttacagagacccagctaccaacctcccccttttataaatgagaaagttgatgtccagagccgggaagagcttggcccaaggccagagctaggattcccgaaccctcagcagagccacctggaccactccgcccacccctccttaccccaggcccaggttcacctgcccagatctgcctttttaggaaaggaaaggagcagccctggtgggggcaggcgggtgggcaggcagccacgctaatccactagctcccggaggctctggttaccgtggtttggggcccgggcaaccctggctgggagtgccagcccagccaatcggtgctgccgctgagctactctgccagagccatacaaggctttgctgcagccctatcttgagccaccacaggacagccccagcgtcggcagccgccccgcccgggagcctgccagcccggcacgtcctcggactctgcctaatccaacctggaagcaggcagggctgcagcgcacgtgcaccgggcccagggttccccaaggccaggaaggtggcactgccagggcagaggccagaatcggggcaaagacctagccgggcatcggagatcctggctggggtcagggatgagctcaggtctggtccaggctgagctgtatctctctgtaagatgctcttctgttcccatcacccctttggcctgactgactgcttatccttccccattcaccgtggagacggggctcagcacagtgagtatctggtcccttctgaggtcttctcagggtccaagtcccaactactctaacccatccagggtctgaggctgcatgcacctctcagaattggggcgtccatttctaagtgcacgttgtgagcatcaggcacatacagccccccctgtggtctttgggggtccactgtcactgccatggatctgggccttggctgtggaagcaggtggggaccggtgacccctgcccagtggagcccatcccatctgtcagtgcataacacctgagtgttatgaattcacaggacccccgaggagtggaaactattggccctgtttggcaagcaaggaaatcaagtcacagagaagttatttgtctgaaactggagtgtcaggattcagccccagagtggtctgactctagatctctagaaatttccgatcctggagggaccaggggctgccatttacactgaagtgtgaatggaggcgagaaagtcattgtctgagataagaggaccctttctttaaaatatgtatctttttattctttcgttgtttttggctgtgttgggtctccgttgctgtgcacaggattcctctggttgtgacgactggggctactcttggttgtggtgcatgggcttctaacagcggcggcttctcttgcggagcacaggctctagagcgcacgagtctcagtagctgtggtgcacgggcccagttgccctgcagcatatagaatcttcctggaccagggattgaacccgtgccccctgcactggcaggcagattgccaaccgctggactatcagggaagtccaagggtgccctttgttcctgaattgggtagggccaggcccccagtgcacggccattgcccaggccctggtcaggttgcccacgcatgcagcggcccctgcagagcgtcccaggccaccactgtcaattagatttgtcacggaagttcactgggttccaacatccttgtgtgtcctacgtgggccaagttgagctcaaagccaagactgcggtactccccagggccacccggcaggtgagagaaacgtgccgacctggggggtggcaggccaggctggcattaggctctgtttgctcacccaagaaaggaagagataaatatagacacaggattactcagacacagcctgggaaaaccggctccgaacctcgacttcagccctggcccggtctcaccttcacccgcctgccccctcggtgtctgctgccaggcctgccccacctgttcccaggacgccccacctgcaaacttcaggacagccgttcctgcctgccttctgggggcaggacagaaactgaggcccagagagagcagggcacccgcctcacatcccacagcaggttaggagctggtgacgcgagggctgcactgcgggagtcagtttatcaggtccaggcaatgcaccagcccagattcggtttccatatttgtgagatggggacctggtacccccggccctcaacgccctggagcctgcgtgtagggtagagttggagaccacgcagcagaaaggggatgaagctggaggctcaagcacaggaaatgctggcccaagccgcatgtgtagggcttcagcactgggactctggagccaaatggcctgggcttaatatccccctccaccattttcagccaagagatttggggcaagtttcttaacatggtgccacaatttcctcatctctaatataagaataataagaattgttattctatacaataaataatatgtacagtattatttgggcttccctgggcggctcaatggtaaagaatccacctgccaatacaggagacatgggttcgattcccgagtcaggaagattacctggagaaggaaatggcaacccacgccagtattcatgtgcttagtcactcagttgtgtctgactctttgcaacccttttgactgtagtccaccaggctcctctgtccatggaaatcgggggcaagcatactggagtgggttgccatttcctcctccaggggatcttcctgacccagggattgtatcacatctcttgtgtttcctgcattggcaggtgggttctttagcactactgagcaaccagggaagcccaaataatactgtctataatactaaaatcccatggacagaggagcctagtggactatagtcgatggagtcgcaaagaattgaacacaagtatgatgttatatatatgtacatgtatatgtgtacgtatatacacgtacatatatgcacatacacataggtattgatacatatatacatgtagacatgtgtgtctacccacatttgggtctcgcaggaggtgctagtggtaaagaatcctcctgtcaatgcaggagacataagagatgcgggttcaggtccctgggtggggaagatcctctggaggaggggatgccaacccactccagtattcttgctggagaatcccatggacaaaggagcctggtgggctatagtccatagggtcataaggagtcaggcatgactgaagtgacttaccatgcatataggcaccggtattcttgggtgggaaatcccatggacagtggagcctggcgagctacagtctatagggtcacaaagagttggaaatgacttagtgactgagcacgcaggcacatatatgtagatgtattatttacatatcattacaataataatagcctaataacaataccaacctctcagagtgttggggtggattaggtgagattagtacaaagcacttacccagggcctgacacagagcaatgactccacatgcatgtttatgatgatgcagccactggggcaggtgggggcctgggcgcaagaggcgtgggtgggcgtctccaagtctcctgccctccaagggaagagctcagccctgagctctatggtgcgttggtctctcctgcactgtgacccttgcagcagctccctgctctgcctgaaagcttcaagagtcaggcagacatggatttgaaggttggctcccacttacgggcttcccttgtggctcagctagtaaagaatttgcctgcaacgtgggagacatgggttcgatccctgggttgggaagaccccctggagaaggaaaaggctacccactccaggattctggcctggggaatttcatagactgtaagagtcggacaaaactgagtgactttcactttgccaccacttacagactgtgtgaccttgggcaagtaactggccctctccaagcctcaaaatccacttttatccctcttgggattggtgtgagggttaaatgggggaacaagtgcgaaactctcagttcagccaggcaagtggactctctatgcttgagctcatcctgagccccatctcttgtttcctccagtttctctcagtggctatgagctgagcccaggacaggtgcatgaccctctgggtgcatgaccctcacacatgcaagggttctcagttatgggaaacactcaccagcccctacatcatgcatgagctcatgttcctgcccttgggtccctggagccatcagagatccgcaagttccccctgtactcttcatgcactcgtgcatatccacacaggctccctctccacattcctgcacacgcacatgcgtgcatctatggacacacagggcacagctgtgtgcgagctcggagaggctggtgcccacaggtgtgtccctgcacacctcaccagcacgcacgctgccacagtcaggggtgttctagccaggcctgccctagccaggcctgcccctgaggtggccgtcttcacagcagaggaatgcagacagctggggatgctctgccagcggacgtgagggagaggcccaggggaaaccacacgggcaggaatccaggcaggcgttccaggccaaggtggagtcctaaggtgtcaggaagtgcggggggggggggcatgtgcagactctaacttgctccagtctcctctctcatcaccctgtgtcctcagcctctaggacttggaggccaaagggttgcacagaccaccgttctccatccaagacagccagccagctctacctgcacagccttgctgcctagcagagcactgggtctctgggctgcagtggcctggtctcagctagaagggatcattcttggcatagggtctttcttcctcactggggaagaatctatgatcacagaagaatctatggggagaatctatggggagaatctatgacccagaagaatctatgactgcagagatcagcagaagaggagtgggttttttttttcctcatttttattaacatatagttggtttacaatgttgtattagttttcctgtatagcaaagtgaatcagcaatatgtatacatatatcccccctttttcggatttccttcccatttaggtcaccacagcacactgagtagagctccctactccctactactaataagtagattctcattcagttcagttcagttcagtcactcagtcatgtctgactctttgcgaccccatggactgcagcatgctaggcctccctgtccatcaccaactcctggagttcactcaaactcatgttcattgagtcagtgataccatccaaccatctaatcctctgtcatccccttctcctcctgccttcaatctttcccaacatcagggtcttttccaacgagtcatttcttcgcatcaggtggccaaagtattggagtctcagcttcaacatcagtccctccaatgaacactcaggactgatctcctttaggatggactggattggatctccttgtagtccaagggactctcaagagtcttctccaacaccacagttcaaaagcatcaattctttggcgctcagccttcttcacagtccaactctcacatccatacctgactactggaaaaaccatagcgttgactagacagacctttgttagcaaagcaatggctctgcttttcaatatgctatctaggttggtcataactttccttccaagaagtaagcatcttttaatttcatggctgccagtcaccatctgcagtgattttggagcccagaagaataaagtctgacagtgtttccactgtttccccatctatttgccatgaactgatgggactggatgccatgatcttagttttctgaatgttgagctttaagccaactttttccactttcctctttcactttcatcgagaggctctttagttcttcttcactttctgccataagggtggcgtcatctgcatatctgatttctcccagcaatcttgattccagcttgtgcttcttccagcccagtgtttctcatgatgtactctgcattagttatctattttatacatagtatcaatagtgtatatacatcaatcccaatctcccaattcatcccccactctttccccttttggtgtccatacatttgttctctacatctgtgtctctatttccgttttatagatgagatcacctacaccattattttcagattccacacatatatgttaatatgcaatatttgtttttctgacttcactctgtatgacagcctctaggcccatactgtcatcattggctcaagtcagagatgacggagacaatgtggaagtcactagaactcttcaggcaggactcatactgactcagcagccagtgtatgttaggtaaggcacttgcatctagcaactccctgagtgcttacaaaagggcctctgctcccatgtacagatggggaatctgaggggcagaggcggcgtcacctacccagatcccctagctggctgactccagacaccagtacgtaaccactgggccatgcggcctctgtcaaagggcacatctcacaccctggaggagaggtttgcaaatgaggctgaaacactgctggcacatgaaagccactgtcccacatgcaggggcagcccagcccaggtggcagagagggctctcccaggtcacagctacatagagatggcagggggaggctgagagccatccaggcttttggcgtcttctggcagcacacatccctggggaccagctgaagctggggaacatgtcagtgttccaagaaatggcaggcacgaaggtgggacatggcctctgcaagttcagccctggggtggagagaggtcattctccatcttcatacagaaaacatggcctaagagggacagagaccaaaaagttccagaagagactgagcagggagaggggctgccagcggagacctgcctccacttcctgaatctctgaggccagggtgacaagtggtggcctcctgtgaaaggcccccgagccaactaggtccctcaccctccagctctagctatttgctgggtggaactgctggggaggagcatgctaggccctggtgctcaggacctcatggatgagggaaggaagaagggagtcagtgcttgaaaaaagtccatctggggaccttccctatactccactggccacactgcctgccccctgcaggttctgtttacagacctggccatttatttacttgctggggagcaaaaatgggaaaatgacagtgctgtcatgggaggacccggaggcaaatgacatgcccaaggccacacagggcagaggattctgacttgtcacaactgctgcttccaggaacacccagatgcgtagccccaaggcgtcacgctacactcaccggggctgccctggggagccgagcctgccctccaactctctggaagaacagggacccaggcacactgcccccggggcagatgactgcacttctctgcgcctctggttcttcaaacagcaatgccttccactcaaggctgttctcatcatccgacggcatcgaacttagatcaaagcatgacctggcacaaaaagcctctcaggcgcctcccctccgcccgaagtttccaaagacttctctaggcctctgcactccttcccaaggcacagctggacttgagacctcgttgtccagcacgagactcaggggaggaaaacaaaccaagaagccagcgtcaccccacttgtcagctggacagacccgcggtccagagaggggcagtgacttgggggaggcacacaagcaggcaggacttctcccataccagcttcatggagagaacaggccttggaccccacgtagtgtccccaggggaccctgggggtctcgctgtggctaagcggcctctcatcccacccaccggccctgcccccaggggttgccgtcctgtgacccacacagggcgctcgggctgccagggccttttagagtcagagccgctgagacttgggaagggggctggcctccctgaggtctcctggggtccccagcagggcagctaagacctgagtccccagcggcacgtggcggcgctgcccgatcggtgatgtcaggcccaccacacccgggccccagcacgttccttctcagagtcggcagagcagagaacaaagcgtcctgcgcattcttgcacgctgactcatcgcctgcacgtagagccacagcagctgctttgcccaaaattggtcgggaggcgggggcgcgccagacatggcagcctggggtcctctgctcactcacctgctccacactctccaggagcccccagtcccaggatttcccaaaacaggcaggaaagcaagaggcactggggggcatgctgttccccaggatagccagggctaccccctgggggagggctcgtgatcaggcacaggtggcaggctggggataaggcgtagatgcaggcactgcttgtctttgagcctcagtttcctcatctgcaaaatggggatgtgccagttaccattttaagcgtttgatatgagttcttttcccatattcttacaccaaccccaaatggaaatactgttatcatcatcatctcacaggtagggaaactaaggcacagacactgatttgcttgaggtcaggtgctagtgggcttccctggtggctcagtggtaaagaatctgcccacagtgtaggagaggcaggagacatgagttcagtttctgagtggggaggatcctctggaggagagcatggcaacccactccagtattcttgcctggagaatccatggacagagcgtctggtgggctacagtccatgggattgcaaagaattggacacgactgagcactcacccaggcacaagtgctagctagctgcagaggtaggatttaaatatgaattgtaaggttccagaatctgcatgtatcccctatatgctaaaatgcggattgaaatatctggtgcccagcaggtgttctcactgtgccctgacccttggtggttgagcctggtccctcacttcacctcactaaacctctaatccctcacctgtaaggtggggtaactgtgaaggatgccctcaagggattgtcagggaaattacactgaaggttcaagtgtgatctgtggaagaaaaggtagatttggttcaacaagccttcaaaccacctttggtcatctaggccaataccaaagtacagagaggagacgagctatgcctggggtcaccagccaggccaagccatactcgtctgggcctccccaggagtctggggaacacggagttgcctgtactctttgggaaagtgagggagcaggaggggccctgccatattccctctgccagcctggcctctcgcccccgacagcctgatttcagagaaggtggagttctttggatctgtcctgtgtcggggtcagaggcttgccctgagtttgtaggaatgaggtggccaccaggtggctttgttctcagctcttacccaggttgcggtgtcccccatctgaggcttgtctgatagtccagagaaagccctagaaggaattcagcacccctaccaccaccagcccccgagccaggcctggtctgggtcccagcgggtctgggccaccacggcacagatgcgcaggactccactctgtgcgctcagtcgctcagttgtgtctgactctgcaaccccatagactatacatagccaatcaggctcctctgtccatagaacttcccaggtaagaatactggagtgggatgccatttcctgctccagggtgtcttcccattccagagatcgaacccacggctcctgaatctcctgcatcaacaggaggattctctaccactgcgccacctgggaagactccactttaagctcaggaggaggtcagctcgggctgggtgtgcacggcctgtgcactggcctccaagctcctttcatccctgggtcctgcacactctttgctccagctcctagcacgtgccatgctcttccaggtctcccagcctttccccatcccatacctcttgcctggaatgccttctccaccttcagagcctcttttggatgcctcttctgctggaaagccatcctgacctttcaggaagaggcaggcactcattcctctggggtcctgtagctctttgtcctccctctttggccaacagaaagactgacacagaacacacactggcccttatcccatagacccccccccccgctgggtccatattccaagaaaaggccttcaagggccctccccccaaatcccaactgggacagagacccacagacccagcccaggtcttgcagagcaggctcagcctgtctactgcatgatggcaaaaggcacagcaaaggcgcctgaactcccatctcttctgctcctggctgtgtggccttgggcaacgcctgtagcttctctgaacttcttcattcccaggccttgccttgcccacttcccaggcccgtttggaagatcaaatgaatgaaggcagagagaatgcttggcgcgtgggcacagctccccacacagctgtcattatcaccgagtcattattacggacctgccttgtgcctggggggggcggtgcctccaaggctgggcagcaggcgggcaggcaggcgatgaactcagaagcagccgcagcctgggctgactcaggctgaggcactgggagaagtgggtgctttatggtcagcctgagccagcccagctctggccctctcctcctacccccaggcgtcacccaaatctgaggccacaaggccttccaggccctttcagggcctcttatctgggaagataaaggccccctccccttgaatggtggatctattcaaatggcttctgtgtgaccttggcaacagtcaccctctctggaccaggcttggggagttccggggtggggggcaggcagtgacctcaaaaggctcccagtgtgtcttccaggtgcttagtggggggactctcccactgctttgggccccagagggatggctcctgttctctccctccctgacactgacctgctgctgctgctaagtcgcttcagtcgtgtccgactctgtgcaaccccatagacggcagaccaccagactccgccatccctgggatcctccaggcaagaacactggagtgggttgccatttccttctccaatgcatgaaagtgaaaagtgaaagggaagtcgctcagtcgtatccaactcttcgcgaccccatggactgcagcccaccaggttcctccgtccatgggattttccaggcaagagtagtggagtggggtgccattgccttctccaggtgatggaactcccagtatcctccctagagtctggagttattatttttatctgacacataagaaaaatgaggcccagagatcaaaagaccctcacctaaggcagcacagtcaacagccaggacacaggcatgtgaccctgccagggtcttcagggcccacctactgcaatcctctattctcctgtggcctcctggctggcgacggctgcctctctctttccctccctggtggctcagagggtaaagaatcggcctgcaacacaggagacctgggttcaagatcccctggagaaggaaatggctactcactccagtattcttgcctggaaaattccatggacagaggagcctggtgagctacaatccatggaattgcaagagttggacatgaatgagctactaacactctttccctacaccctaggacaccagctctatgccaaggcttggacaacagtcaccaacttatgagatcttcacatgaatgtaagacagaggaggaagtcaaagctcagagagctggaattgcttggcctggtcacacagcacagtggtggctggaggctcagtctcccatacctctgctctgtgccctagaacagctgctaccccaggatggtaggggtttgaccaggcctcagggagcctgcagggcagccctctggtttcacagacaccccctggctatgggtgggccaaagaggaagggtacccatcctgccaggatggacctaccaggcccacctgggcccgacgctccttgccaggctcagatggaagcatgaggtcattgggccatccctgctccctgttggctctcgctgctgtgactcagccctgtcttccccaaacctccttctccagggaactctagcaatggtctggcctggccaggtctgctcccgctgcctgtccaccctctcagggcctcccagcctgagtcaccgctcacctcaccacctggcacaatgctcaccgcataaacagactattcccctcccccaggctcccagggttcctctccctacagcccaggagccaggctgaggggtgggggcacttttcctgctgtccccagacttcggccctgaggtccatccccagaacctactttcagggactctctggccttgataggaaaatctagaattgagattgaggcctcagcccagggctcagactgacctgggctcaaatcccagctccttccttgttaggtgggtgaccttgtacaagatacctccatttgaaggagggcaacagtaaaaccagctgcagcccatgaagatttcctacagcatcaccgaggccaggatcctgcttaaaaatgcaggtggctctagattcaaatggtggtatggcctcgcgtaagccactttgcctctctcagcctcagggtccttacctgcaaaatgggaacgagaggaagagagccctcctgctgtggtgactaaatgtgataagacatgaaaaaggtcaagccgtgtctggcacccagggaccaaacacgggtaaacgtttatgtggataaacggtagctgtaattaaatcttaaagtgacgtgtgcataacacatagctcgtgggaagctgccacatagcacagggagctcagctcagtgctctgtggtaacctagacagtgggatggagggggcaggcagagggagatccaaggaagaggggatatatgtatacatatagctgattcatttcactgtatagcagaaactagcataacattgtaaagcaattataccccaattaaaaaaaaaaaaagtgccaggcgttaagtgatcccaggatggttttaatgaatgatggggagatggagagcaatggtctggctcttcactggatgatggagtagcatcagggaacggcttcccaggttggaaagctccagcatcccctctgcaggttgaccaccccacttcccttagtgggtccagaaggctctctcaagagtctttctggctggggctggcctcacagttttccagtttccaggccactcaagaagcacttcactttacagaggacaaagctgatgctcagacaagggaaggggcttgtctgcagccacccagctggaagctgagcccaagcctgcacttccgtgttccccttcttcccagcctgggagctgcctccctggactggggataccctcacctcccagtctcagagagcactctgggagagtctcagagcttgtctgcacactggagactctttatctttgtctctatcttcccccgtaatgctcgagaggcagctccttgggccatggggccagtgaaagaggagaggacccaggagaaaacttctgtgacctcctcatttccagttcaacgggtgatgtgttgagcatgtgatctgaatgagggaacagaggctgggggaggtcgcatacgtaaagggtgaggggatagaaataacactgaccctggggtcaaacagacctgaattcaaaccccaaccattacacgtcaagctctctaacttctcagaatctgaagttgcatctgaaagcagatgccttgagatgcctcaaagggttatgctgcaaagatgaagtgagagcaagagtgtgaccaggctccgtaaatagggatgaaagtgaaagtgaagtcgctcagtcgtgtctgactctttgcgaccccatggactgtagcctaccaggcttctccgtccatgggattctccaggcaagaatactggagtgggttaccatttccttctccaggggatcttcccgacccagggatcgaacccaggtctcccgcattccaggcagatgctttaacctctgagccaccagggaagcccgtaaatagttatagtcagtaataatgatggctaccaccgatggagctcttcctcatttaatccttacacagccatgttactgtgattatacccattttacagatgagcaaactggagctcaaaaaaggaagaaagggcatatgtgatggggaagaaggggtctgacaccagaaccagagaccttagctactagccagccctcagagacataaaataaagcctagccagaggtggttatgggcgtgtgtgctaagttgattcagtcgtgtccgattctttgtgataccatgaactgtagcctgccaggctcctctgtccatgggattctccaggcaagaatactagagtgggttaccatgcccccctccaggggatctcctgacccagggaatcaaacctgcatctctatgtcacctgaattggcaggcaaattctttataccactagtgccatctgcaaaggtggctatggatgagaatattgtgggtgttcagaggtgagttagatctcatgtcttggatggagttgggaaggctggtccatggggtcacaaagaatcacacatgactgagcatgcacgcacgcacctgggggaggcaacctttttgatgggccttgagtttgggcaaaataaatcaagtaagaatggaaggaggaggaaaggcccaccttgcacagaagttgggaggcgagaaagtgtgcagtgtgttcaggaagtgacaagcctctgggaaaaggaaggaaagacaggtccaagtcaggtcccaagcaggccttatgccaggtgggcatttggactgaacaagatgcttcacgctgacaccaggccaggtcctggctccagaagcctggttttcataggaaggcaaattgacccaagtctcaatacccctcatgtctgttgtggcatcaggtactgtgccaaggcaaatgtgggtgagtggagcaagccaggctggccttgggcacctggagggactgtgtgacccagggcagtggaagggatgctcgtggtgcagctggcacatggtgtatagattcacacactttctactacatcccccccaacacacacatgcacacatcactcttttgcaggagtgtgtccacaccaagaggcccacacacaccctgcagcctgaggtgagggagggagagatagcagaggcctgctgaaagaaactcctgtgccaggcaatgggccaaagcgtccacgagctctgccacaaagcctccttgcggctatgaggtaggacttttcttcttaggagtctcggatggatgtgacctctgatactcaggaaaattaaacagtgctatacgcttggtcccaaggttggtgagcagcaaaatgaaagcacagactggctgcccctgccctgagctccgtagggcctgacacagtgctgggcactggggataagtggaggattggagtctgagtcacagggctttgaagctggcagccagagcagcggagcctcagagattccaggggtgggctggcccctgactcacccccacaccctgaggctgccccaggcagtggctttagctcctggccgccctcctgcctgccagagcccagcaaggcctcttctgagtctgtcatggctcaggattcccaggagctgggcgggcagggccaaagcctcaaggcaaggaggtatcctgggcacacctctgctcaggtatgtaggcctagagtcacagtgggaaccccggacctcaccagcctgatgtcagaggcaactaggcacttggggatagctgttaaatgaagaatgaaatactgtatttctgcatggcccagactccgggtggctcaccccttcccagagggaagacagccgcctggtgaggtgctgggtgcgccctggaaagtatgggttctaggcaacacggtgggtgtgactctgcaaaaccaccagctgcgtgtcttggctggtggtagtggagggaggagaaagctggggttccagcccctccaagtgcaggggcctcagagatgagaatccaggcattctggatctccaggatctctggtgggctgttccttctccctgtacctcagtttcctcatctaggtgtaggccaagggactttccctctctggctgcctgtcttttgcttttagaaattatgtccaagccttcatcgttagagcattttgaagatgtaatcaggcagaaaaggggacataagtcttcttcatcttaagcggtgtctctgcaagggcagttttgtctgatgagattaagtcatcttgtatattcactccagccttgggcctggaccatgtgcccaggcctgtgtgctaggccctggggttgggattgcaaagaagactgtgtctcagtgagttcataatttggggggagagacacctctcccccagaaataaccagatatttccaggacagtttaacatgcctttcaaagctctttgacctttccaatatctctaaccacatctgtcatgatggagaatagatgggtgagagattggttgtatagatatatggatggaaggatggataaaatgtcagataatggataaatggatggatcaatagaagggtggatggatggctgtggacatgggaggttgaatggatggatggagggagggatgaatgggtgagtaggtgaatagattgtgggggttgggggtgggaatcattgaatgtgtgatttaggttcctggtcccacagcagatgaatataaggggaaagttccagtcctgcctcttgttcattgtgtgaccctgaagaattcacttctttagctgtagagtgagaatctgtctggaaagacctcacctatcaagtgagagtcatgagcccagcctgcatcccaggtctgttgtgggtatccagtgaaagaggtatggactgcccatgcctacataatggctgtgatgagtcctcagtcagtggcctcacaggcaccggcaacgtgaggtgtttttgctgagggagtgacgcccctctgtggttgctggtgtgttcctaggcttcccacttcctccagcctgcacagagttctctgcccagttaggagcaaaggaggtgacctctgcagaagtgttgctgccagaggctccccatacgctgtacttgtcaaggagtaattgaggtgtcctgtttgttattcatctcagggtaagagtaggctcagcaagggggcacccagggcttgggattagggctttggagttacatagatctgccttccagccttggctctgccacttcctagctgcctgacattggacaaggcatgagcctcagtttccccatttataaaatagtaacaaattatagtacctaccccttaggtaggttatgacaattaataagcataacttatgtaaccacctaacatagagctcagaatatattaaatgcatgtgtatccaagtgcagaattgcgcccttagaactttgaagaaaagtccaaaacttcaagtctagagacctccatcttgaatgctcagtccttggattagtttccttatttcaaaatgttcagtgggactgacattcttcttgacaagtgtgccttgactgaacagtgtctggttttggctgcaattccaggagttccatgggcctcgctgaccctgtcctgattacccttaggttaatagcagactgggcacatgaattatccctttaaaagtggtttgtgtgggagctacaaatctttccaatgggctgagctgtagggaggaggagaatttagaagggggtgtcctcccggggaagccgcaaagaccaggagagctggtcccacaggaccgaggctactcttgcagagacccagtgtggggacgatgccgtgggcggtggcaggccctgctggctcagggtgagctgcagccgatggcaaggggcccagaccacccaccagaaagaggccctgagtctgagtggccctaggcttgagtgggggcagtcctgacctgtagccctgaggacataactcgggaacaggtcattatgggaatgtctaagctccctcagtcccgaaatccccaactcaggctggctccggggccataccctccccagacccccattccttgcagggtccagatatcccccttggccagccccatctgcccatctgctcgctctgctatatgcctgcatggtatgtgcctgcgactgagactctgtgtcccttccattgggactgcaatcaagagagcttcctgaaacctggtggggccaggtgacaacagggaagtggctggttttccagaaagtgaaagagcaaagggttccaggctgggagcaggagtgataacaatgaagtcacagagtctgcagagcttgcattttgggagctggaaactcagggcaggttgattctgcctgtcgtaggctatctgagctgagcaggcccctcacagtcgatgggaagagaggaaagctgtccagggaagccaaggaagggacaggacttgcccaaggccacacagcgtgaatagcaaagctggggacaaagctgcccactgctacaacatcgggtagctgctccagccctttcctgccctgttggacatcatcagaaggatgtttaatcctcgctcctgtacatcctccatcccatgccactggacagctattcgatgggaccaaatttatcattagtacaggggcaatcaaaggagctttggggtccccaggaaggtggcctaggcccatcccaatgtccctgccttcctgccagtgggatccttcctgacagcccttctcaaagggacccagtgcggctcagcttggacccctgggaactacactggtgtgcaggaaagggtgagtctggattagtagcccggagagtgtgtccagcccatcactgtcttgggcaagttgctcctcctcttggacctcagttatctcatctgcccaatgggagtgaaaaccagagagaatttctagaaggcagttcctagcatggtatatttcttcacccaaaaatacaccccaactatcctcttctgccagcccgccctccccacaaatctctgcttcttggattaggctggtgccaagtgtaagtgaagcaaattagtttgtgtgcaaatcaattcctccagcttctgacagggtgatctcctgtgaatccctgtgcctcagtctgcagcctttaccaacccaggcagggagcggggccaggtggggctgaggcagtgcagcagagcagctggtgggggcagtcagtaggaaccagagcaaaggagttgagggcccatgcagccaggtcagccaggaggcatagaggtgactgtcggggcccaggcctagagacctagggtggatattcttgttgttcttgttgtttcttagttgctaagtcatgtccaactcttttgtgaccccatggactgaagcccaccaggctcctccgtccatgggattctccaggtaagaatacaggagtgggttgccatttccttcttcaggagatcttcccaaaccagggatcgaacccacatctcctgcattggcaggcaggttctttaccactgagccatctgtgaagcccacgggccaggaactaaaggaaattcatgtgtgtattggaacagttggcttgtgcagacagaccatgatcatgtcaaaggcaagggaagagggaataaagaaaactgctgtttttaactcggcttgattttctctacctggaaaccaatcttgccagtgaggtggtgctgttcccggaacgctttcagccgctaagaccggggttcgctcaggttcccaggtccggcgtctccatttcacaggagccctgctcgcccggctggagcagcgggcagggaaggagggaaactggagttgggcgcagcctcccaagctgaccctgccaggccgggcggtggcccctgtcctgtcgtcatcctcctttcacagcagagagggatcctgtctcctggtctcgttaattcttctatcatgtttcccagactcggagcctctggttgcctattgtcctgagcaggcattttgcatttatgtaaagattagacaggttagaaccttcgctctcactccgatggtcttttttactttctcaaatccaagttctttccttctcactgcgctctgcttccttattctctctctctccctacctgtctttatcagcctccctgtttattttcttcccttccctgaccccctccttctccccactgacctgcttttcctctgtcctctcttcacagttcagtagtttgaatcctctttctcccccctccaccaccgccaccacaaccctaaccttgcttaattccatatttatcttctcccggagcctcatagaaatgactgaaagcattgctcacctcattccagaaataactcttctaaattcttagagaggcaccgcacgggggagggtgtgagcactggacagggagtcactgtggtttactggagagaacaagacccaggttcctctgtgggctcttgggtacaccagctgtgtgaccgtgacaccgctggcctctggccagtctctgtttcctcccaggcagcagtggagctggcacccagatgagaacagctgtgtgtaaggttgtgaaggagagaggacggtggtgccctgcacacacacttgtgctctgaaatgtttttcctgcttccaccgcagcctgagccagtcggagggaaggaaggggatgctaactggtatctccctccttggttctgctctgctctacagggatcacacatgcgcgcacacacgaacatgccctgggaagaaacaaagctgtttcttcaccgtcatctatttctcccttccaaaatgtctaatggtaaaatcccaactgaacacaggagcaaaaacttgggctttagtgggttcctgaatttctccatttcaaatccaggccttcattcattcaccgccccctccctcggacagcactcactcagagtctcctactgtgtgccagacgggctccagggctggccttctctggagctctggacctcgagattgttggggagataagcccaatgtcatgagtcaggcatgagagagagcacgggttctgggagttccaagaaatgagagggcctttcctcttgtgcctggagacagggtccctgagaaggagggactctgagccagccgaggggcaggagcaggatgctggcccccagggagcccctccatcactctgccttttttgcagaaagtcacagaggtgagccaagacatcctgtcctggccaagatgggaggttttcccaggggcttttggtgtacatatccacaagccacctttctggaaagggctctgagggccccttcttagcatcaaggaaatctgtgggtcacataggttaagaagaaggaaagaagggcacttcctgggggaggtggggaggaggcggctccaggctggtcagtggtcaggggtaaactgtgtccttccctaaggaaagcaggcccagagaaggctctgactctcccaagtccacacagccttgtaggtcatttacctcccacgcagcagaagggacaccctccacctggttgacagtaggcagacaggaaagcagggtctcctccaaggaaagggagggttttgcccatgggacctctccctcccaactctgagctctgggcaagacccatggagagtggggaggggctcacggcatttggaggatgacttgagggggtccagtgggactgaaaggggtccctggggacagcacgggagcctcaggactccaggaggtgctccaggctcagagggagcatcctcccccctttttcctccctcatcctgccctcctccctaccgcagaggctggggcgggccgggcgccctgggaggaggcggtgtccctggctccctgcccaccggtgcagggctggacgggcaggggcggagccatgcctggtgttataagaggcagccagggcaccgaggcaatgagctgtcgctcagcttggcagcaggacgctggcagcaggcacactccgcactccagcccagcctgagcgtgcctcaccactgtggtcgccatgcccaccgccttgtgctccatcgctctagccctgctcgtggccctgcacgaaggtgagcaccccccacgggctcagcagctgcagcagccccgaggctgcttgtctgtatctcctgctggggctctgtgccccccaagccagccgggggccttcaggggcaggagttaggtggcttgggggctgcaggaggctgtgctattagaggtgctgccgtcccaggacagccaccggtccttccaacccagagctgctggggcttccccaggctggcccagggctcctgagcactgagaatgccaacttcctcgattatgcaagaggaggagcccagcgggtcccccatcccagctgtgccaggcgccctgacccacctctccacttttctctccctcctgtgcatgcaggcaagagccaggctgctaccacccccatcccagagcaaccagcgcccttgccccgggcccgaggctcccacctgcggactcgacgttgctcctgcagctcctggctcgacaaggagtgcgtctacttttgccacctggacattatctgggtgaacactcccgggtgagctactggagggatccaagaggggttgcagggggcaggggtggggaatgctggcatgctggggaagccctggcacactgcagctctctcttggagtgtggggctaacaacaatagcaatcagctattgcttcagttctcacgtgggggctgcctgagcaagacagagggctgtctcatgaaaatcctcacaaaaagcctggtcagaaagtgttggctccattttccagatcagggtactgaggctcagagaagttaggtgccttttccaaggtcacacaggaagagtaagtggtaggtaggaggctccagcctaggtctgcagatgccagagcgcacagcggctctgccatgctgcctctgtataatcttccaagaatgatatgattaatgacagcacccatgtcttgactgcgccaggccctatgccaagcactgctggtgcgttatcacctcgtgaacgcacccccatcctccccagtgaagcggggactgctgctgtccccaaatgacagacaagagacctgccccatgtcacctggcagagccggggtggggtcccagagctgtctgttctgtctgcacccgcgctgcctccgggccactgcatacttcaagttgaagtttctctgtgtgtttgtattttttttttccttctccaaattgcaaaagacaagagaagcccggcacgtaagcgtgtgtggagctaatccgcatccaaacactggctcagggcgggaaccctgccagtccctgcgtgctgggtctacctggagtctctgcagctccaaccacaccgtctaaaattagctcaggcatccgaggtgctggtctgaccggccacggggccctgcccttcgcctggcccgtctcagccagacggaatctgaaatcgatctcagccaatctaatatatctatgcacacacacgcacacgtgcaggtcaggcacacgcaccattttaaagtcaaaactctaagaaacacttgggtcacccttccaggcaagtggtgaccggatggaggcagctgagctgtgagcctgagtgttcacttctgtgagagggcactctctccctttcttccagactagttgggggtcttctttgagaacagggggaccagcctgactccatcagttcaaattgctgtctgggagtgagaggggcagggaggacagcttccacccctcccccccatgctgagcgtcttactgagcaggaccagggcagttgggagggaacagaggcccgagagggtaagggtcttgcccgaggctccctggcatgtaaggaggaagctgcagtgggaattcttgagggcaggagctggttacttttgctgccaccctggtggcatggatggctatcccagtgtgcagtgtggacagtcccagcttgccaatggtcctggtttatctaatcctctctctgtctctctccaccctacaccactaccttgctggcggcccgcccacagacagacagctccttacggcctgggaaacccgccaagacgccggcgccgctctctgccaagacgctgtgagtgctacagtgccagggaccccgcctgtgccaccttctgccatcaaaggccctggtaagtgggcacccagcctgcaaggggccagaggtgactgctggcctggacctgctctggagggcagggtgtctggaaggccagcagtggcggactgttagtccctaggtcgtgcccgactgtttgtgaccccacggactgtagcctgccaggctcctctgtctatgggattctccaggcaagaataccggagtgaattgccattcccttctccagggtgtccaggaggccagcagaggcgtggctaaatggtggaggaggggccaggggagcagggtcctgggggtccagaggctgccctgggctgtggggcagcctcccttcctgcagggagccagtcacccttgagtcttcccccctgccactacccccagctctgggggcttctgagaccattgcgtccccactcctgggcaggaggaatcctccccaggtgatagctgaggcagcacaggtccagagaggaaacaggacttgtcctgtcaggctacacagccagttagacgagagctgggccttccgccttagtcgctggggctctgggacctctggaactttctcagtggagaagcagtagctggagttggggggccatggcaccgtccccgagctgccacaaagcgcctttgccagtcttttggccctctggacctccctccctccacgcggagcgttgggaaagcagacagtgacttcaccctcccctacctcccgctctcatgaaggcctatgggaaactcctcccctgagacctcagctgtggctgcagccctgcctcagtttccctgctgagggttctgcttggctgcaagtggccagactctgggaaggccagccaccccactgcctctttctgaggctgagaacgcattcccagtggctcagttttcctcaggccccaccccacctgggaaaagaagggtgccaggtgcacagggtggaaatggatctgctcctgagggcgggtcggggcggggggctgggctgggcctgcagccaggcagcctgggggccctggacagcccctcacttgggccctaatgctgttcactcaggactgatgcggtggcagtcccaggcagcgggtcccctgcagctgcgttccaggatggcaagacacaggccacagcaggagagctcctccagcggctgaggtgaggggcccctacactgattgagtgccttctgtatgccttgcacatttcccttattctccatatgacgccttgggtccttatggggcagccaatagcagctcagacagatgaaggtgtttacccaaggtcacagagcaagctacagcatctggctgactcaatagcctgtgttcttaaccactatgctctttgttaccgccaggcctggaagtggacttttattgagggtttcaaggcttgtgactgtggaaggttcccaggtgttcattcaggctgtgtctgaatcaagcatctcccacatgctggggtccaaacggatgctacccagcctgttccctccctgggtcccagactggactgtctccctggtagctacaacatggctcagctcaaggcttggcatccaggaggtgcccatgaacgtgtgtccaaccaaactgacttgagaacagaaacctatagccagtcatgtggcagggtggctgaaggggcagcatctgagctagaaagtcccagccctgccacgagcaagctttgtgaccttggtctgctcactgaacttctctgtgcttctggttcctgtctgtgaggcagggacaccgctgctatccatctcacgggcttgttgaagtttagagcagttgacatacatgaagagccccaagaaagcccaggccctacgggagctctgaaggttttagccatcccgaacctctgtccctgagggttcctcagggctgcccagggccggggtgcagcctagcccctcaagggtccacatctctgtgaggaggcggaaacataggcaaaaagacaggatggccggctaggcaggacccaggatatactgaggaactatcttaaaaaaataataataaaatgaaagtgttagtcactcagtcgtgtctgactctttgcaaccccatggactatagctcaccagactcctctgtccatggaattctccaggcaagaatactggagtgggtagccattcctttctccagaaaatcttcccaacccagggatcaaacctgggtgccccgcattgcaggcagattctttatcatctgagccactagggaaacccaggaaatgtcttaagatgaaaaacttcaaggtaagactttgcaagtacttggcattccataattagcaaagagtgttttcgccagtctgtactcagcctcacaccagttcaggcctgtgtttattttacagaccaagaagggggttcagagaggttgagacccttgcccaagttcccaaagctgggaaccagcctcccagttcccaggctagaacgccttaagccagagtgaggccacctagatgacggcagagcccctaccagggtctcagccagattcaaaggactgctaggatccatacatatctggagctggaccttgaagaatgggaattttagggcacggagtatggggtgagtggaaggtcaacagcctgaagagccacagggatagaggtgtggaagtgagagggcaatcaggggagagccacggggctactcttggccgtgcagtcaccctggtggcacttgatgttgagcatcaattttgtcaaagctccttgtgggcagaaaagcttctaacctgccccggcctctccttgaggttcagaccttgttttcagggttggctgtgaccaccctctgacctcttggccatgaataaggaatccagaccctatgaccgctgcctctcatggggaactctcaagtgatgtatatctccagagatgctcaattgacctctttccatttcagggttatttctgcaaccaagatccactttgctaggcaacagcagaagccgacgagggagaccagacctacacactccaggcagaggaagagatagctctcgactctgggagaactttgggaaggaagcctgtgtggatacaggaggagaggggcatcccagagctgggagaccttccgacctgtttcctgggccagaaaacccagctgctggagcaggcacaagctctggcctcctcgccctggggagggggcctcgctcaaggcagctccgtgacaccaggaaagtcatcaggccccaggctgcagcgtggcctcccacactggctccagttcctaggccctgctgaaaggaacggcatgcggaatgtgctagcctggaggtgtcctgtctggcggctgtgaaccaggaacaacgtgcagtggcgggcactcacacccaagccagcccgagtccttccagggttgaagtcccggccgcccccgacccctcacccccgctctgtcccctccagccctcgctctccagtgtccttattctcccttcataccctcggggcactcttggtgagaagggcctgcaccacttcacctgtctgtatataacttatttgctctaagaaatttgacgattccgattatttattttaacgtatttttttagactctcaattatttacctgcgaacttgtgtttgtaataaacaacaaaataatgctctagcatttggtcttggttgagcaggaggtgggaggcacttttcaggaaggggctacttagaagtgaagggaacaaagggacggcggggaaagagcctgaggcaggtgtggagcactgagttccacacccctgtgccccggctgggcatcgctggctgctgacccaccctctctggacttttgcctatcatgtgcctagacagccatttgcagctttgatatcccgggttccaggacctgtgtttctatcaggccggtaagtgttggccaggcctttccccagagcatgtttcataggagccaagactataaggacccacttctgctctggttgccacccctgaggttcagagcaaacctgtccagtgagggctgtgtgctgttccaagactgtgtgcagccttactggccagggatggctgttgtaacggagtcacaggctggtccttatccctcaccctgggcttggacagaccccgctgggggcgctcaacacttctctcactaaagaagcccagggctctagcactggcttggctgatcctgccaaggccccaggaagctgctcacctgagtcccagggacagccagaagctacccccgctggcagctcctgagacctacagcctccactgctgccaaatccccctgcgaacaaactgttccctttcccctggccggcctctgctgggaatggtacgctgtggcctgagccagttattgaaaaataattatttacacactactctaagcctgccttgtccatggagccagccccaactccctcctgggagaagaacatgttgacgcatattgaactcctactgtttgctggcattttatgcagataaactcacttcatcctcatgacaatcccatgatatagatacttttattatccccattttacagatgaggaaactaatgcacagagaaggcaactaattttcctggggtctcgcagcaagtaagtggtagcatcaggatttgaacccagagtgtatagtacacatgtctatatgtactgactaaatatttgttgattgaattcatggattaccactgtagtatgacattgaacaaatcttcctctttctgagcctcagttttttaatctataaaatgggaaacagtactttccactttgtagagctggttgtgaaccctaaatggatgagttatggtgctgggctcagtcctgggcctgatgagaggcaaagccgaatgtcaggccgttagaagtgatgatgtaacaagagggacaggcacaaagctgcaggacctaagttggggggagattggggctggctggtgtgcagaggcatggtcagagaaagatgcacgactaaggtgccactcccacagcctaaggagagtgagactcacatcaatagaaggaaagtgaagagggagccccagacagagcagacaggaagggtaaaaggttttggcaatgggagtgacaaaggggtttcccatggaggaccccatgtggctggagcatggtggggagagagcagcaggagaggaaaccaggactccctggaggccaaagtagggagcctgcactttctctcatgggccatggggaccctcgaaaggtctgtgggcagcagggacctggtaaagccagactttgaaaaaatgccagagggccacacagggggaccctgaatggggagacagaaggcagggaagcaagtcaaccgctggtccttagggatccagcctgggtggctggggttggcgatggagccacacagtcacttcctacccaggattccggcacacctctgaaatctcactgagcctaacgccaggtgaatctcactccccagcatcctgttcaaaataaccctgcccccacggaaatcccaaagcaacggccaacagtcaggctaggcagtgatgtggggcaaccccagcatggcaggagtgatcgagaccaggtagaggaatgtaggttgaaggtgtgtccgaggcccagggaattaggcattcactgccctggtcagagttcagagatcagcgaccaaatgattaagtaagagacaattagagggaggcccagaaggcaggtgaaggcaaggcgataccataacccccaggatccttactctcaagaaatgggggcccctggcttgggccctgcactctagccctctgccagccatatctttctctccaaataagaagtttgcagggtgaagggtcatgaatacccaaagtctgagcctgcttctaaaccacattccatgcagcaggggcctcagaagtgtgggggaaggtgggatagagtttggaagaagcagaggaaaatttatgaagaactgttgccaaatcaaactgaaccctgggaagaaaggtgtcaacattttagaaagcatatctggattttatgggacaaaatcgtccctttttcctgcctttttctgccttttccataaatacttacaggtttggtttaggctttctgagttaaacttgtgttccttttaactggaacaccaggcggagataggccagaagggggcacagggtgacccagatttattcgggtcatgtgcatgcatggaagcagagtcagaggggagtggagttccatgtccaggactgtgcagcctgatacatatccaggctacagactggccctttcctgtcctggactgcctctccctccactctctcattcagcaaagaaccccaaggaactagtttcactcttgccatctcactctctctctgaacctcagggatttcaattgagaaaagtcatttgcctatcagggcaatgaatcattggagtgtggccatccatgcgttcaacaattatgaacaatcaccgttcagagactcccgtaaacaaggcagacacagcccctgccctcacaggccaagaggagagcctttcaataaagcactgttactatgaaggtagaagtgaaagcatttattgagtgctcatcaagctcttcttgcacatggattctttggatccttgcagcaaccttacacagcaggttctatcatcgctattcccagttgagagaagagataacggaggttaagcagctcacccaaagtctcatggctagcatgtggctgagctgggatttaaatctcaggctctcagcctgtctgctgtcctgctgctctaagcaggtagatccatacatagtgtgattgagcccctcgggtgggagagtctgggaggcttcctggaggaagtgacagttgatcaagagaaggagcgggtggacagagtgttcaggcagggggaacagtgtgtaggaagggagctatattctctgtgcttagtcattcaatcctatttgggacctcttggtctatagtccgttaggctcctctgtccatgggattctccaggcaagaatactggagtgggtagccatgccctcctccaggggatcttcccaacccagcgattgaacccaggtctcctgcattgcaggtggattctttaccagctgagctacccaggaagcccattctcagaccctatcagggaacaaaagaaggaggcatggggaagactggagaggggttgctagcggggtcgggggggtggtgggcatgcggctacaagcagggaaatccacagctgctgtcacctcacccccaatctgtgacagcctcagacaatgtccccctggacaatattgccatgcctgaaacacacctttggatcaaaccgtgcttgcgccccttggggtttccctaggctggcaaggaagacagacaaggcaaagtgaagagacaggaggtggataggttacgggctgcccttccagctgtgtgcccttcctgtctccctgggatctctgctcatttcatcccaggggcgttgtgggttcacagggaaagcttggggaaggagtagggtttgcacacactgggatgagggaaacagccggagcatagaagaatccgaaaagaggcagcaagcctgattggcaagggccaggctgggaacagcatgcagtgccaggaatttgaacttgagtgacggggagccagcgaaggtggctgatcaggggagagagccaggacaggagctggccttgggcagctggcttgtcctcggctcttcctgcctccccggccagtgcttccagctcaagggggccctcccagcccctcgcaggagagacaaagtgtgggccttgcctccgcctgccagggaccggagccaagagccctcagcagctcggaagggggccatgtgcgggcccgccaggagccctggaagaggaatgtggcctaattaattctccaaagctcagagggcctcgccttgtgggagcagctgccaggacaggcctgccaggacgccacaggcccagcccgtctatcattcagtgctcggggacagcaggctggaagcctggagacaggggcccagggggccagccccttgcctccaggtacacacgtgtcctccagccccttaacagaaaatagtgcgataatagtaataatcgccaacaggccttgagggcttaaaggtgtgtcagactctgtgcaaagcctgttatactcacttctcatctattcattacgaaggaccagtgacagggaaactgttaccatctccattttgcagatgaggaaactgagggacagatgggtgaatttccctggccgaaatcctgcaatcaaaaagcacacgcagggaagctaggattgggatgtaggcagcctgggccccacaagcatgttgtcataagcactgctgagccagcccagcgaggacatggaggcccagggtggagcgatacctttcccggggacagtcgactaaaaacaggccctgggacattgaatagggaagaaagaccacacccctgtcctctgcttgaactgcctcctcctgaagtttctcatagggcttttcctgtctcagcccgtaggtcatcctcaaagacatgtgactcgctactccaggcagatgggctggaagaagacatgccgtctccctgggatccctgctcatttcatcccggtggcgctgtggtggctgcactggcagctgggcgaggtggtctcacagcttcctcctagcccgctttccatccgtccacggaacacatcccctccaaggcgggctctgaatggtgcagggacggctgtaccagggccttccaactagaaagtggcagacccaggagaagatgggcacacagactggcccgaagccaagactctgctcttcctcagcagcagagcaggaggagggcagtgcagccacatcgcatcccctctctgggcctcagtttctcatctgctgtatgggcctaagagcattaactgtatagtcttgtcctgcattcatgcaggctaagttgcttcagtcatgtccgactctgtgcgatcctgtggactgtagctccccaggctcctcaatccatgggattctccaggcaagaatactggagtgggttgccatttccttctccagggggtcttcccagcccggggatggaacacatgtttcttacatcttctgcgttggaaggcaggttctctaccactagggccacctgagaagccccatagtcatgtcctggaactcattcatgtgtcaagtactgtccgaagtagtttacttaatttttaaaaattttccaaagcaaggttttttcatagctttgtaacatatcaccataaggctgcaccatatgcatctgttactctgtaggtgtgtattttagtttgtcccatttccctccaatgcaatgtttacatgtgtgctacatttatacacaaattttatattcattcctaattcttttttgctgcatattttttatggagacataatttacaccccataaaatccactcttttaaagtgtacaattcagggtttttttttaaatatattcacagttatacaaccatcaccactatctaattccagaacgtttccatcatcccaaaaagaaacacctcacctgttagcagttgctccccagatctcacttccccggcctctgtacaccacaaatctactttctgtcactatggatttgcctgttctggacattttatatcaatggaatcataacgtacgtggccttttgtgtactgctccgttcacttagcacaatgtcctcaagatttgtctatgttggagcaggtgtcgatacttcacgcttttccatgactgaataatattcccttatagagacagatcaggcttcccgggtggctcagtggttgagaatccccctgacaatgcaggagatgcaggagatgtgggtttgatccctgggtcgggaaaaacccctggagaaggaaatggcaacccactccagtattcttgtctgggaaatctcatgaacagaggagcctggcaggctacagtccatggggttacaaagagttgaacatgacttacaactgaacacacacacacacacagatcacattttgtttatccatttgtctgcgttgtttccactcttttggcttaagcactttactttagccttcagtgaccctatggggaggtgctctcttttcatcatataaacaacaagactgacatccagagagcttaagtaacccatgcaggtcacttagctagtgagcggcggtggtgggctttgccccaagagtctggctgcagagacagtggcctcaaccactgagcatcactttctcttcagtcagagtaagatagtataaatcagcacccacagcaactgtgccaaaagtggtacccacagggcacttaacagagggtggcttttctcagcagcatttctgacactggcagagccagggtctgccaggcagggcctgaagctggagcaagagtgtctggacagccagtgataatagtgactatctcagtacacgggtggttcttccagcaatggggacatctctccacacttggtggggggccgtgggcactgactcctctgctgcacatctctggcctgcaccccagagcccatctctcctcccacctccacctacaaagtcatggctcccctcctgtccccaaggccctgacactgagtaaccgaggcagcattcttgggtgaggtcaaggtcagagctgcagtggaggctgcatggacccttgaatgggtctctgtctcctcaggcctccacctactaaataattagataagaaatcttaatacttccttttttaattacaaagcaatttaaataggacaatatagacacaaaggcttgtggctttaagataatgaaaagactataggaacatctaaaataaaatgtctcttctgggcctcccactccaaggcaacgactctgagagtggggtaaatagccttttttttttctatgggttcagatatatgttttctatctaacgttttagaggtattaaaaataatgcacggcaacataagtttctctactttacaaccttttcttctcacaccaaaggcatctttccagaccaatacaaggcttttaccacctcttaattttaacagctccacgtggcccttgttaaggacaggcagttgtcacttgactgtccacccactgaagccttttggatggcttgcatttcttgttttcataagcacactacagtaagcacctggtttatacatctttgtctgcagaggacagatttttagacacgaaatttctaggtcaaaggatgagcacattttaagtattctgccgagaatgagattccaatttgcattcttgttcccactgggtatgagtgcccttttcctcacaagccttccagcactgggttttatccatctcttatcgtttgctgccctggtagcaaaaccacttcttcataaggaatacgatgtgcaaaagagctttgcttgatgccacccagggtgaggagggtgaggggtctggagatgctccaatgtctcactctgtcccctggtgcaaagaactcctctagggacttccagcactgctctccaggattctgtttggctctagggctctgtctctcagttccactcaggggttggccctcagggagctaagaatggaggaggggctggccagtcttcctgctcagttggccccagcctcccctaatagatgtgtctttgagtaggcgctcctggggacagcatcatcatgggaaagcgtgtgtgcgtgttgggagcggggggactctgggcacctgaacctgcagatgttcctaatgggggagcctggggcatcctggttccctctcagcctgccatccaaactcacgttttggaaaagactgaatctggatcttgcctctgcccaggtcttgctgtgtagacccaggcaggtcactgtcctttctggactccaggctcccggctgccaggctgggggaatccctttacagggtagatgccgaatctgctccctctggagactccacactggccacaccatgcgcatgagtcacccccaagttggcaggctgagggcaggggaggggcatggaggcaagagaagggaggctcgctccagatgactttggtgccacatggtgagtctggcgcagtggagtcttgcctggctaacgtgagtgtgtgagcacaggcacacagggcacaccgacgtgtgaagtgcattcttgtataccgaccggggatcctcctgctcaagtctgggcattcaggtttacagctcaggtgatgagtgtccatacacaatccatgtgtgtgcacattcttgtgcgtgtcaacacatacacgcatgtgtgcctgagtgcccctgagcttgtaaatcttcacctggttgtggctgcctagatgtgtctgcatgaacgtgtgaaagtgttagttgctcagtcatgtctgactctcctctgtccatgggatttcccaggcaagaatattggagtgggctctctggggcattttcccgacccagggatcgaacccttgtctcctgcattgtaggtggattctttactatctgagccaccagggaagcccagatgtgtgtgcacacatgtgcctaaatccgtgtgcatgcgtgagggtgcaggtgagcctgcaggatgtgcgcacacgtctatgattagagattacgggtgtgtgggtgcacaagtgtcacaaacatacacactaatgtgtgcgtttgtgtctgagcacatgtcaaaacacatgcatagagtatccgtagtgtagatggagtgcgtccacatgtatgggtctagaagggcttcagtgtgcatatgggcacagctatgtatgaactattacagtgtaactctgttgaagtgaatacacatgagtgtacatttgcacccaggaggggccacctcagcgtctgcaaactatgacatctcctccagggcccatcccacctggcctggacctctcccctcaacccacactgaggaaccaacagaaggacagtgtcattgctttaattacaggaagactaagtattttagtaattagtaagtcattataaagcttactgcttttaagaacaaaaatggctatattatagatacaaaatgcatatggaatctgaacaagaagcatggaagtgcaggattttccaccccaatctgggtgggagggcttgaagaccaagtatacacagggctcaggaaggcaagggagggagaggccagagcagagagcccctgcctccatttccaaggctgtccacacctgacctccatccctacctccatccagcgagatatcgttctgggcccagagggccccaaccctggcctgagtggaagtcagggagtgagtgtgtcagaccacctctgacagcaaccagtcaaggcaaggcccttctcattctcccttccgtggcctataactctaagatagtcatacctacctgggttttctcaaagaacctcaaaatataacctccaacacgtgcctacctccttcatcctcccagaacaatttctacctcccacccccagctcctgtccttctctcttggcctgcactgcctccttgccacaggtctgacccacaaacttctactcattggtccaaaaccacgcctgtgtcaccacccagctgtacaattgtcatcccagctggactgtgaactcctgaggtagggaaggctcaggcattcttgggtccccagagcccacctcaacctggcacagcttagatatcactcactatctgattttagaaactgagataagaggagaagaaagggagagcccctgggcgcagcaacgtttggtaaacacggcaggtcgttgggtgccccaagactggatgagtcagcctgacccttgccctggaggaggaagaaaaagtgtcatttatcaggctccacctggtgccagcatcagccacacacttgatccccaccacacacctgagaagtaagcaatatttttactcccattttatagatgcagaaactgaccctcacagaaagtgagtcagcagcagagctgggactcaagccttcctgactcagcacttcctacaggctcatccccccaggttctttctctctgnnnnnnnnnnnnnnnnnnnnnnnnnnnnnnnnnnnnnnnnnnnnnnnnnntcctcaggaacagcccttaatcataaaggattggggtggtgggtagatacgccagctcacttgcaccatgggtggagcaactctaaggctgcttccacaccctctcccggaggtctctggaggggctaagccctgtttccacctgttgctcattaacttgtctgtattggctgcgcttcctttctcccttccacatcttttatggatcttagaaccacctcgaaaataaactccatgccctcgaatcttagtccaggtcctctctggggaccccaacccaagaccaaggggcagcagccacagggactgtgagtctgggaaagccagggggacattcttgcaaagaggcctcggccacagaggcccagagacacatgcaggtccagacccatgggatgagccctggcaggcgggaggccagcctgactgcagctccagagctgcacacagtgtcaggctggcgcatgaggacgcaggagcaccagggtaaagagggcacgggtgtgagcacagcagctgatggcaacggggtttatctcagggcccaagaccacacccacacctccctcccttctgcagaaatgggcctggaacacctgtgccctggcaagccctagggtagaccccggctggaaaaccccagggctcccagctggccttctactgctcagcacctctggcctgggtcctggcagagcagggaggctgcctggggaaggtcttagatggcaaatctgtacaattctgtgcctctctgtccttcccattcaagaaatggcacagggccttggtagggccgaggaagtgaatggagggatcccagcacctcagagggcccctgttctctgactctgccaggacatagtttgcacacagaacattagatgtggcatatcttgcttccccacgcttttcagaagagggtgggcttccctgatggcactagtgttaaagaacctgactgccagtgcaggagatgtaagagatgtgggttcaatccttggatcaggaagatcccctggaggaggacatggcattccggtactcttgcctggagaatcccatgaacagaggagcctggtgggctacaggccatggcatcgcgaagagtcagacacgactgaagtgacttagtatgcacgcacattacttaacccagaggaatcaagttctaacggtggaaattcaagcattggaaaagacatggcttgattttaggagttggccttccctcaaatcacaccatgtcaaatctcagacaggcagcatcatgaagcagaaaaggcacaggctgtagagccagacagacctggctcaaatccttggagacagaaaagcccctcatcctgagctttggcttccttggctgtgaaataagttgacagtgtccactggcgggagacctggcttcagtccctgggttgggaagatcccctggagaaggaaaaggctagccactccagtattctggcctggagaatcccatggactgtatagtccatgaggttgcaaagagttggcactactgagcgactttcgctttcactttcactggccccaggtaagcatcttcaatctccttcagtcctcagtctggtgaggaagtaactccagagatgagcagatgggcactaaggcggccaactcctgctcaggtgggtccagagtgattcagaagcctgctgccccctgccaggggcctctgaggctgggctgtgccctgtccacttcaccctccccctgtgtggcccagccctgacccgagactcacccactgcccggtttcggcacctggcccacagttagccagggctgggtcttcagtatcaacattcctctgggataaatacctttggcctcaggaatgctgggaactgggccaagaggtcaaagggcctggactttatcctgagaagctcttaaagcctcacagcacctagacgaggcaggcgtagcccagtcataaagagaaactgagagccactgatttcatccaagaaaagaaaccaggggcctccttggttatcctccataagaatcaggacagcagaagatgaaaaaaatggactcaaagcaagcaacagactggaaattccacttctgggtatttaccccaaaggagtgcctagatatgttcatctgaagatacatacaaggttgttcacagcagcattgtttataatagtctcatactaagtgaagtaagccacaaacagaaagacaaatatatgattttccttatatggggtataagtgataccccatatatcgcttatacaaatgataaaaatgaacttatttgatgaaaaaaatgatacaaatgaacttctttgcaaaaccgaaacagactcacagagaacaaactatggtcactggagggaggagttggacatcagcatgtacacactgccgtgtttaaaataaataaccaacagggacctggtgtatagcacaaagaattctgctcaatacagtaataacctaaatgagaaaagaatttgagaaagaatagatgtatatatatgggcaactaaatcactttgctttacatttcaaactaacacaacattgttaaataactataggtaggtaggtagatttagttgctaagtggtgaccgaatcttgcctgccaggttcctctgtccatgggattctccaggcaagaatactggagtgggttgccatttccttctccagggatcttcccgacccaagaattgaacctgagtctcctgcactgcagtcagattctttatcaactgtgctatgagggaagaaaactccttaatgtaattaactatagttaacataattagtgagtgaagtgaaaattgctcagtcacgtctgactctttgcaactccgtggactatacagtccatgaaattctccaggcaagaatactggagtgggtagcctttcctttctccaagggatcttcccttaactagaagttaattaactaattagaagtaaatataattaactatactccaatataaaatttaaatatatactagaatgttcatagcagcactgtttataatagtctcaaactggaaactatgcaaaagggcagcaacagtagaatgaataagtaaattgatccctggtggctcagatggtaaagaatctgcctgcaatgcaggagacctggattcaatccttgggtcaggaagatcccctggagaggggaagggcaacaaactccagtatttttgcatggagaattccacagacagaggagcctggtggggtccttggggtcaaaaagagttggatacaactgagcaactaacactttctttcttcagattgaactacaactgataaaatcatacggatgatcttacaaatgaaacaagattccatcctttaagattccgtatgtctatatctatatccatgtatatctatatatctccagttttagtggtgccagaactcagcaaagtgatttcccttgggggaatgagggcaggcagtgactgaaagggaactggaagggagcctttggagaagcagtcatgttccattttttgatatagcttcagggtgcatgggtgttcttgttttgggaaaatccttcaagttgtacatttatgatctgtacacttttctatatgaatactatgctcttgaatcttgtgttggaatcttagcgatatgccctcttctacgtatggcctcttttgtgcaacattgtatttttgacattcatccatgttgtgacatgtaacaagatttcttctttttcactgccatgtagtattctattacccgaatagaccacaatgtgttcatccattctactgttgatggaaggtgggttgtttatggtctaggagctattacaaattagtgctgctttgaccattttttgtacctgagttttgatgaataaatgtacatatttctgctaggggtatacctaggggcgggatggctagctcatagaatatatacatcttcagctaacggcaccccactccagtactcttgcctggaaaatcccatggatggaggagcctggtaggctgcattccatggggttgctaagagtcggacacgactgagcaacttcactttcacttttcactttcatgcattggaggaagaaatggcaacctactccagtgttcttgcctggagaatcccagggacagtggggcctggtgggctgcagtctatggggtcgcacagagtcggacacgactgaagcgacttagcagcagcagtaatgctttggaaggaatggtgctaaagctgaaactccagtattttgggcacttcatgagaagagttgactcattggaaaagactctgatgctgggagagattgggggcaggaggagaaggggacgactgaggatgagatggctggatggcatcaccgactcgatggacgtgagtttgagtgaactcagggagttggtgatggacagggaggcctggtgtgctgcgattcatggggtctcaaagagtcggacacaactgagtgactgaactgaattgaactgaactgaatgattttccaaaatgttttaccattttggacttccatcagctgtgtatggcagcctcatattctcactagcacaagcacaagcatgctttgtcttgtagccattcaggcaggtgtgggataatttgcatttccctgctgcctagtgaagttgagcacctgtcttagtttgggttccctaggtggcgaccctgagacaaggatttgagagcaagaagtttcttggcaggtgtgttcgtctcctaaggctgctataacaaaataccatagactggtgtcaaaacaacagacctttattttctcacagttctgaggctagaagaccaaggtcaaggtgccatccacgttcgtttctggagaggcctctcttcctgccttgcagatggttaccttctcaccgagtcctcacatggttgcttctctgtgcatgtatagagaggcggagcaatatttctggtgtgtctttctcttgccttcaatgtaaggacaccattagggcctcaggcttatgacttggtttaaaccttaattatctccctaaagacctgatcaccaaatacagtcacttgggaaggtagggagacgtgattcagtccatcatagcaggcgatcctaggaaaactcacaagggagtgaagaagtgacagcatgcgggaggaggctctggaagtgcgtgtccacaagccagttgccaccctgggcatctggagttgaatcccacggggagattctgagaaaccacgtaaaccacgccctcgagagttatcccactcagggcgccggggaggtggacttctatacatcgactcctgccggtcactggttgaggcctatttcaaagtatgggggtgtggggtgggggcggtgatgttagctccctggtgcctcccaggctcacagaagccctgaggctcggagctgcgggtacacaggccacagcacgtcctcacatgctagtaacggtcgaatcctcacttgagtgaagtggttactcttttgaagctgagttttgaaggatgtatacagatgggccaggcaggagacagcattccagcagagggaacggtgnnnnnnnnnnnnnnnnnnnnnnnnnnnnnnnnnnnnnnnnnnnnnnnnnnggtcttccagggccccccagtcctctgactctcccaaatcctgactatgtactgcaagcaccactgaatgccagaatgtctcccatagccagagacatagacgaagttcccagcagagaggctgcaagccaggtcggggccggagcaaggacaaagggaccagcgttcccagggcaacagaggctcaggccacaggatgggcatcagagaagtcaaggcagatctcaaggttgacattaacaaaggaccttgagctaaggtatggggtcctgaagccctgagaaaggcccacttatactcacccccatgccacctgagttcagactgtgctgatcctcctcagtgtcctcccaggtccgaaaagctgtgcatgtttacactgtctgcagagcctaaaccaggaaggcagagggtcagggagaggcgggcccagggctgtgggcttggatgagaaccccctaaccaccattttgacctgaggggaactgggaagtgggaacctaagacaggtctgagcaggctctgactgctctgcagagctatcagcttggagtccagccacatccagttctgtatccaaataacaggcatctcatctgcagaagtataacctggcagggcccaggcatcgtgagtatctgtcagtccagccacactttggcaagtcatgtcccccctactaatcctgctctgtgtggcttgggtggggcagtctccccacacccaggcggcgggcttgtgaaccatgcctggccaaccatgtccccacccccaggtgccgtgattgactcaaggataaacccaggaccctacccaggccaacaggagtctcccttgagacttttactagcgatgtctggaaactctctcatctgctgagatcctgagctgtaaagaagagatgggaacagctggtggacagcttgcaagatagagaaaatctgcccagaataaaagaaagaaagaaaaaaaaaaaaaaaaaaaggcaggcctagctggaagatggagagagagagaaagagtctttgtggtgtcaattaaacacctgggtgcagcatgtctgaagttcctggactcctcatttgcatgagccaacacatttcctgctgcgtttatgtttcatcatggtttctgatgcttgcagtctgaaaggatctgatgaaaatactgggtgagaacacaaccagtgttcctttctgcaccttcatatctcagagatgtgcacggagtttctttaaaaagggcctttgcgattggaatgttgcagtgaggccaagatccctgtcatgctgcccttctttgccaaatgacaactaactgactcaaagtggagtaaacactgccaacagcttacattcaagagttcaggatgctactcccactggaagacctgtcctggaaagctgccctctgcctgactccccagagtattctggaaggtgcatttttctgaccaacagtcaggattaattactttttcatttgttgaaatatgggggtcagagttatatagacttaagagagagggaagaaaatagtgcatttttgcaactccagcctgaatgggcaatattgcacgttgcacgacttgatttgtttaattcaatgaagctcgacaatccacccaaatgtgtttaaccataggggtttggttaaataaattataatatatggattaaaaaagaagtaaggtagctctgaaatataccatcataaaaatatgtctcatgtatgaagtgttaagtgcactttgcacaatcacacctcaataaagtgaagttttttcaaaaatcaatttgcccaattatatgtataacatatgcccattaaaaaataatacaacagtcctataacttgcaaaagtttgtcatttatatgattaggtgggggaggtgggcaggaaaggaaggcgaaaacaatttgcaattaaagtaactcactctccttggatgattcagtccatgccagctttagttccctatcagagctatttccccttcacaagctatttcccaagacggaaagaagtataagcttgggaggctatgaactagaaacttgggcgtctaagaactagaagctgggatgtctttaggacttcagggaagagttcctccctggcctcacatctctcttgtaagaatgcctcatcctatgggttcagagtctcagttttcatcccagctgccattacctgtgcagcaggcagagcccagggctgattttaaccttgcaaagactgtagacgctccagaagaggagtgctgatcaggatccctgcagtctggctaggacttggggacattgtgaccctgtccagggtcctgactggcaagtgacacaccagaactcagtggctttctgtgtcccctgaggggctgggaaatcaaggcaaccccttcgcatcacacaggagacaagcgtgagactagagggtaccattcctggtcttctctctgcctgaacactctgtagtggcttgaatgctgacccctcagatgatatgtccacatccgaactcctagaacttgtggatgtgaattggccaaagggtctttgcagatacggggctgccctgatagctcagttggtaaagaatccatctacaatgcgggagatcccggttcaattcctgggtcggaaagatcccctggagatgggataggctacccactccagtatcctgttattcccttgtggctcagctagtaaagaatccgcctgcaatgcaggagacctgggttcgatccctggttgggaagatccttggagaaaggaaaggctgcccactccagtattctggtctggagaattccatggactgtacagtttatggggttgaaaagagtcggacacgactagtgactttcactttctttgcagatataattaaattaggtctcaagatgagatcatcctgaattatctggtggggggaggctctaaacccaatgacaagtggcctttcaagagaaagtccaaggaagatgtgacatagaagagatgagagatgactcagaggagaagaatatgtgaagacagaggcaaagactggagtgatggagccatacaaaatgccaccaactaccagacaccagaagaggcaagtaacaggctgccccctagggccggagcatagccctgccagtactgagatttcagacttctggcctccaaaactgtgaaagaataaatttttaaaccacttgttacggcaacccaagaaactcatgcacatttcctgctctcctttctactctactgtgggtatggaccaaatagccctccagacagcatcctacagagttctagaagtgggcagaagtcccctctggggtttctagcttttctacaaccgctcccaggctggggctcagagagaagggtgaggcacaggcagcctcttggcatcactctttcctcctacgaatctgtttttccagctctctaatggctcctctgagaaatggaagctctgcctacattattccgagctgggcaggcatttcaccctgcactgcaccataaattctttctacccgtgccttacagtaaaactccatgttcagtcctccaagtttgcgcctggcatctgcaggaagtcctgggagcagacaactctgctttctctcttatagtaggtgctgctgattctctacccaccttctctttccctgctccatctctttaaaatgacccagttttcattccggagtccatcttgcccttacatcacccacgtgcttcaggtgaggctaaccccaacctcagctctgggggctgctctaactggtggcatggaatctatcccacgtggtccagaaacccaagcctgagtgccagtgcagggcacctctccggccacagaaacaggcatgcaacaccagccatgatgccaagggaaatatactgggacctgctggaaacaggtatttccttgctgttagaaggatccaccagaagggacatgttctccttttcccttggtgtcctggtggtgaatgtctggcaattctgaggggagccaaccccaggatgaagccatcagacagagcatagccaaggggctgctgagttctaggccagagttgctggattaagccagtcctgaagcccaccctgtctctggaatctggttacctgagccaatacatctcattgttgaagccactgtgtcttagacttactgttacctgcatcccaaagcatcttgccaatataccacttgccacagccagttttttaagactactgtcctgttatgggttttgagatcctattttgggagtcaaaagctaactaagcattgttccttattcctcttacattattattgtagcaatttttaatcctccctaaggcagatggatgcctctggctcaataggaggaaaattcacataaggaagcttgagaaaaaatacacgttactgtatttcaaagaaatgatccacattaccctaacattcacacaaaaaacctgggggaagaacttctaaactgtgagcaggagcagctgaagaggacttgggggatatgtgtctccctttctaggctagtatcactgtaatgtttgaatttctagagtaagcatgtattacacttgtaatttaaaatcctgaggattagagtcatctgaggcatccagaattccccaggtaccgtccatggctcagctgtcaatcctgcagaaagtttatttgtggatcagagcaatgacttaagaagaatagtcacaatgtttctttacaatttagactttttgtttcaacagcgtacactgatctagctgagtgcatgttccccgccacaggaaacccttgccaaatctgtgccaagtggtagttaacaggactttggtgtctcctggggtcaggagaggggctgcagctctgagtcagccacagtctgcctcctcccttccaccccaggatctctggcacaaagcgcccatgcctctgtgaggtctgaagggcctccttgcaaactccaatcctgtgtttatgctcctcctgcaagaaggatgccacctcctccttggacagagatgaggaccttcagtatctccagaggggtctccagactctgggggccagagaccacagcccagaccccagtgccccgagagccccctgctctgccccagggtccccgtcactccctaggggttctcttctcggcttagtcctgatgcaatctccaagctcaactggcctgtctctgtcatttcccccaagctgataaagccagaaacctcagagtgagtggaaagagcctctgccctgaccagaagaaaccgcagggctgaccccataccccacagtaagagctggagaggctgggctctgggctcaacgcctggggagaggaggaagaaagatgaaagagctgaagaaaagaccatttgctatcacccgctcacacctgtccaccactctctcttccctggatctttccctgtgcttggtccctggactctgtccctctctaaagcttctggctccaggatcagaaaaagcctcagtgcgagcctcagttctagaatctcaactctcagaaaggctagtatagggggcctcagcactcccctgcccagacatgcctggggtaggtctgggattccttcatgctcacctcctccattaagggctgggcacccactagaaggcatcctgttccccatgggtatccagaaccctcaaatgtcccaaacctcctcatccaccctcacctctgcctggatgggcagtagataccccaggtctcttgccccagtcagacccctatgcaccaggccctgtgctgggcatcaggttcagagatgaggcaggtccctgctgcaggacagtggggggcaggggacagcaggtgggccaatggccagatgaaagcagtcacagtaactgccagctgctcggcccgatgccagctggggacgtgatattgaatggtcacgagccccttccccaacaagcagttcaagttcccagcagtggtctgtacagaagccctcgccagatgcagcatcgctcagagaggtcctcctggttcgcaggatttaacaagtaacccctgctccacggtcctatcgccctctagcattacgtgctcgatttgctcttccagtcacccactcccatcactggagtgtaagctcttggaggcagtatctgggtcattcttacaccccagaccctgggatgctgtctgggcactcacagtgtatttgtgggtactggatgtgcatgaaaggtggttgctggattcttgtccctccttctaccctatcagtcacctagccaaaccacccccaagacctgcagaagctgtctcttctgttctgtcatctctcctcctcgccctccccagactctaaacccagcctccccagcccttccttggtatttcttaatctctaactgctgctgctgctaagtcgcttcagtcatgcccaactctgtgcaaccccatagatagcagcccaccaggctaccccgtccctgggattctccaggcaagaacactggagtgggttgccatttccttctccaatgcgtgaaagtgaaaagtgaaaataaagtcgctcagttgtgtctgactcatagcgaccccatggactgcagcctaccaggctcctccgtccatgggattttccaggcaagagtaatggagtgggttgccatgctttctccgcctaatctgtaagcccagttcaaacgtcacctcctctgtgaagccagctcagatccctttgtgggcacattgcctgtcacatgatcctactgggcgctgcagccacgtgtttatgtgtctgcggcccccgcccccaccaccacctccactgctgaacagaagatcttcagaactgggctggggcccaggtctctgcgtccagggcttctacagagaccagggctgggcataatatcagagctcaggaacgatctgtcagatgaataaaggagtgagtggagaaatgaatggatgagcccccgttagtgagggatacgtgaaggagcaggcggatgcatgaatgagcaagggaagaagctaccgagtgaatgagtcagtgacttggggtgggggggagggggagtgagcctgtgaaggagagagagccgtgagggtttcagtccgctccagcagccctggcagcagccagcccccgccacccctgggcctgagctccgtgccaaccagacctcccgatgcctcctcccagagccagctgccgtcagcaccgctcagcacgcgctcccgatgctggccagcccctgcgctgggccatgaatcagacagggcactgccccagggctcccaggacccggggcagacagacagcctcataaataaacccgatgccctgctgggcagacatgtgttccagcagtgcagtgagctcagggttggctctggagccggggctggcagggcagagcctgatggagaagcctgggagagcctcaggaagagggacctcagggctgggcctggaggagaaagggcacccggggcaggagggctggcagcagccaaggcacagtggcttcgacagacacaggagtgcagggggagggcgtggtggaggtgggaacatggggaacgcagggcctgagtggtggggtcaagaagttgggattggcagagccagggctggggacacagcaggatgtaagcagagtggggcacaaggactgcgggctggcggtgctgtatctcagaaggaaagatgggaggctatggggaacaggtctgtgagtttctagggcgctcagggctgtgtcctgctatagctgttgcataattgagcttctggcttctctccacaaagtcaccatcatcctcccagccctaatactcaccaccagcagcttgaggctttggagcacccaaattagggaggttactttggtgagaacacttccaagtgggtgtttttaagccaagattgttttataatggttcagatcatggggaagatcctggggtttctgaagcaaatcagggaatttcagaatttgacaggaaacctcccagttgaatgggtggaggccaccaattcaaagatgctgagcatcctacagtgcacaggacagcccttcacgacaaagaatgacctagtctaagagatcaatcgtgccatggtgttcaactctttgcaaccccatggactgtaaccctccaggctcctctgtccatgggattctccaaggaagacgactggagcgggttgccattcccttctccagaggatcttcccaactcagggatcaaaccgggtctcctgcatcacaggcagattttttacctctgagccattgggaaagcccagtgtcgaggttaagcaacctgctttcacaggtgggaggactaagacggtgaggatgctagaccaaaaggtggtctccagtaattcacgtgggtcttcatacgtgccaggagctgttctgagaacctacccccattcactcatgtcatctcttcctgctttgaggatgaagattaaagacatatgtgattttcccagggtcacacagctggtgggtggtgaaggcaggattcccacccggattgtctggcttcaaatgctgtgctcttgatcatgacatcccatggtctcccacatcacccagcagctgggacagagctgggcttgggcccagagcccccctctccaggcagatgttccttccactctgctctgggccccaggtccatgtaggagtcttgggctcctccaccaccacagacgtggagcttagcaaccgggactttgatttgtgagggatgcagtgggtgggcaggaggcagatcccagggacagagggcctttgtctgcctgcagatgggcaggggccagttgggtgcaaactcattagacagctgccgaggctgccaaggagacgggagcaattagcgggcttggctgaagccaggaagtggaagccgctctgtgagagctgctgagcctccctgccctccaccaggacccagctccctaggaggcagctgccaagtttatgttcagtttgataatggcagctccaaccatccttacaggttgaacctactatgtgctgggctaggcacattccatatcttgtcttttttcatctataatcacccccacccaccttgggaggctggaatgactaactccattgcatccacttagtcatccttccattcattcgacaggtattcatttattgggtgcctactatgtgccagctctgtgctaggtcccagagatgcagcagccaacacagcagacaaaagtctccactccagtggaccttctgttctggaaggggaagacaggcaacaacaaaaaagaaacaaacaaggtaactgcaacttgtgatcagggctatggaggaagtgaaggggctgatgggaggatgctggggataaaggaatcagggaagctctctctaaggaggtgacagttcacaggggagggacttgggctccgagaggaaaggtgacttttccaaggtcacacagctggaaggtggaggagctagggcttgcctccagccttgacctgggcacctgcctcacaggagcccctgcccctccaccaggccaccatccacagctgtgccacacactggcaccgtatctccaccccttcctcatggcagcctcatgaaattcgtggggttatcacctccatcttacaggtggagaagaggcccagagggggccttcacaaacccagggccctgcaaaggaatgacagacaaggggcttgagcgtcttttgatccccaaacctgtattccttctgccacacctccatccttcctggccaagcacttgacgcgcactgagcgtttagtaggccgataagaaacagatggatgcatggactatggggccttgggcatcatctcctttcagtgcttccatttctccattagagaaggcgagagggtccagaccagcttcaaaatgcccaagttcattctactctgttgacattccttgaggagcgtggtcccctatggagaaaaagatgaaagggactctgcctcccgcagactattctgggcggagcaaactgcaggcagaagcatggaggtgggaaaggaaatggcgaggagtcagcagacatgtttaggacgcggagagccacctggaactcatatctaagtgtccctttccttttcctgcattcttaccacctgtcacctgcatagggtcttaggccaccagagcttcatctcctctcaattccagctcttgcttgagtcccagagagtctcccagaggaggggctgaagcagatcccaaatatatctgtgccaccaactgtgcacagtgtgatcttggtcaggcagctggtcccctccctcagccttggtcttcctatcgattaactggggagacagtgatcagagcaagtcggtagcacaataaaaggtgaggtttatgagcacattctccatgtcaggcagtcatcccttgagacaggcaattttgttatccctgatgtacagataagagatctgaggcttagggaggtgaagtcactggcccagggccacacactaggaaatggctcccccgggggattcacgcccaggtccatctgatgccagagctctgctcataacaaaaagctcatatgaagcaatgccctgccctttgacccacgcaacactcaacccccaggactttactcgtaggaaataatccaagagagccaaaaacctgttcacagcgggcctatttacagtatggcagatcactggaagaaatctgcatgcccaacgacagggctctgttcactttagaaattaggcagcttcagatggactgtggcttactgagcaccagctcttgccagttgctccactgtaacccccaccctaaccctgcaaagtggatgttgctttctgcatcctgggtgaggcctccaagttcagagtgtgaaggattggctgagggctcacagccagtgttgggccagggcatgagtggtgtggccaggcctgttcacagccacaccccaggtagctctgttctacaagaaaggaagctaaggcaagtaagtgacccagtaccacacggctgataagcagagaactggagtttgaccacaggaactgggactgcatactctgggaccacttccccacactgccacctactgactgggaaactgcaggcgagtcatttaccattcccaagcctcctgggctcctcatctgtaaaatgagaataagattgtctgttgcgcatggtgtcaccatgtaagcagtggtaaagatagcaatggcaacactggtaatactgctattcacagtcgataccaccgggacagcgttctgccgtgaaaggaaaccttgcctgaacgttagaaggactggctgcaaacctcagctaggacacgtctcaactctctctgggcctcagtttctccatctgtaaaatgggggagggcacacttgagcatgtctccggctctggtggtctctgagcccaggaacactgctatctcgggttttccctgggactctgcctgctgacccctcatcacacactggtctgggggagcgggggcgggacgcagtgggtctgggcttgaggacacatgtactggaggaggacaaggggcccttggacagggaaatggaggttaagtcaggaagccccaacactcagcccctcaacacacagcccctgctcctggcctaagggccactcaggcagcatctgctctaggtcctttgtacctctgcatgggacctgcctctgccccacggcctcagtctctcccctccctgccagcccctcaaggagatgctgaaccttggtgaagagaaagcagaggaaggcaaggaaggaaaggctgaggggaccaggagaagaggagaaagcaccctgagaaggaggggtgaagagcatggttttacataatggatggtaggggtgggatgagaacgaggcttgggacggggtagggaggaagaagaagaggtcaacagaggggctgagagggtctctgacatttttcagagttccctttaccaaccctggtgaccttcgggtgccctctctttatgtcctgctgactggatacactgggagccaggcctttcacagaggtcatgccagccctgagggcaggcctcccacatggctccagccccataggcggccacacagaagggccaagggatgtttgcgggacaaaggacttggttcactctcccaaaggctctgaactgagaagaatgtagacatcatccaatccacctttcctcacctgccgccccaccccacccccaccaagggaggaaggactttctcagggctccaaggtggggatgtcgatgtcagggccagaaccggaacccagtgtcctgtgtcttgggcctttctccagcccagccctggagggtcccagcagcaggaagaatccctgcctctggttctggcttaataaccagccacgaggcggggctcagggcctgcggctcagctgccagtctccccaggttgcaagagcattaaatggcctcagtgatgcacagctttgactcctgagcaggcgaggctggtggcagagaatacactgatgtgacatctgggggctcctgggagcctgagccccggacaaacctccaccagcgtctgaggaacctcaggctctgcagagtcagtggcacagaggcccgcagcatccttggaattgaggcctggtgtggcagaaagaggagaggccagatgacccaccgagataccccagaggcagcaaagctgagagacacagccagctgcaggttaagagctttcaaaaactttcagctacagccaaagacaggagatcagtttgtaaacagacaacaaaatcccacaacaccctcagatatgtcctaactcatctctctgatgggctcagagctggagctggcctgctcagattcctcatccctttccaagaaaggggcagcctagccttggacttggagaggccaatgccttcctcaggccagttcttctattccctccccatccaaatgcatcaacaaatcccctctgggtttattttcttccctccttccctgcaggactccagcctcatcccatcagtggtgctcacccttcctcccaaaccctccctggctccccatgtcaacaaggtggcattcagactacttgacttgacattcaagtgtgatctgctctctgacctcaaaccctactgctcccctctgccccaaccatgactctcagtcttgggatgttcttgccacaggaactgcacattccaatctggtagtgggcatgcttttcctctgaatgcaggtgacccatgcgtctgccccaatcagtggggccatggtagaggggactctcaaccctaccacttcctggaagtgtgaccttggggaagggagtctcacttttctcatctgcaaaatgggaatgctgatcccttcacgggattcaaaggtctgggcacagtgcagatcacagaactattattagctattatttagctattattggattccctgatagctcagttgataaagaatccacctgcaatgcaggagaccccagtacaattcctggatcaggaagatctgctggagaagggataagctacccactccagtattcttgggcttcccttatgactcagctggtaaagaatcctcctgcaacgcgggagacctgggtttgatccctagttgggaagatcccctggaaaaggctacccactccagtattctggcctggagaattccacggactgtatagtccatgggtcgcaaagagtcagacatgactgagcgactttcactttcactttagctattatttatcaggatcagtgctgttattacttcgtgcggtcccacacagcaaacatcctaagcaccgggccactggcaggccccaagtctgtcaaactaacctcacatgataatattagaaacactcgcctccatctcaacttgcatatgtgaaactgaggcccaggggcccaaagcccagctaacagcagaacagaccagaagccacatctcctgatttccaagccagaactctttccctacaagctgccactactaaaagccgagttcagacgccaaactttaattgtgatagtctcagtttatacaagaagaaaaacctttgctccatataagaatctttattatttattctcacttttaatgccccaccttgaacattcctatgtaccttcagagaacacccccctcctcctcctcctaggcaaagctcactcctccagctgctctttctccccacctcttttctctctccatccctggggaagcctttatctgaccttccctggcggagccaaagggcaaatgctggcttgcctttttgctgctcagctaaaaagctgactgccttttctcactttctggattgtgttgttgttcttagcctcaagggtctaccctgtaagagaaaaccagaacctccctctccaaagcctttatctattcccagttcctcccatcttaaaaaacaaccagggaccagacaaagcaaaccttcttctaccctcttctccttcagtctggcccggtttcttggtggtgacctgttatctccaggctccatctccttggcttcatctcctactcgccaacccatggggttgcctctgctgtgtcttctgttcaggtctgcagcgactccatttcccccaggtgtgctgggctctgggtagccttcaatctgcctgatctgtctgcctcagtttcctctctgagcgctgtctcctgggggttgtctgacactgtctccccacagccctgccagtaacttctcaatgccctttgttgggctcctcctccatccaagccttgacattctgtcttgggtcctcttgtcttcccatgctccttcccttggcctccttataggctgaatttccatctctagccaatgattgctagagtccacctccagcccaaacttttctcctgaggcccaggcctgggcaccctgttgcctctactggatgtctcttgtctttttaatgattatttatttgtttatttggctgcactgggtcctagttgaggcatgtgagcgcttagttgcagcatgtgggatctagttccctgaccagggatcgaacccggattgattgattgatccaggggtcaagacagggatcaaactctccattgggagtgcagagtcttagtccctactgggtgtctctaaggtagcatcaaccgagcacatctcaaatcatctcatcattttcttttgtgaaacccatctcccctcccgagcccccagctctacattcagccccaccacccaccctatctttgaagttgaacacctagaagtccctgatgtgtcctctttctcacccccacacccagtctgtcaccacaccctgctcagtccatcttccagaagcctgtacaacctgtccaggcgtcctgagtccaccacctcgacctcaatccaaacactccacttctcccctagtggagagtcctaacgggtctctcaaagccacacataccctgtactgcattctcacagcagccagaggggtctttctagaacacagatctttccatgtcatttccctacttaaaactcattactgtctgccaaatgttctccagtgaaacctccagatgtttggcgtctggtcgcaccctccccacccaccccccaaacccggccagctctctgagcacaaaccactctgtcttttcagctttttctttcaatttgctgtatttcttcctgcctctgaggctttgctgttgctgttttctctgtccagaatgcttctccttcagcatccccaccaacccatccttaagagatgaggccaagggttgcttcccaccttccccccagggcctctaggatttcgacagctgccaggctgtttgcgctcacccctgggagcttgtggttgcttgattcatgtctgtctgggctcctggactgcaaatcatgaaggccaggggccatgtctgtcttgctcatcctaaaaccacactgtgccaggcccacagcatcccacagccccacctgcccaagctacccccagtccacaaagccagcattaactgccccagagaccaactccaggctggaattcaaggcctcacccttccaaaactccccatccttaacccctcacacacaccttccccatccacactggggagcctcctctctcctccctttgctcccccccatttttccttcatccttctttctctaatgatattcaagctcaccattctccaatgatgcttctgttccctgaccacacagcccatcttattttggattgacaggcatcctccctagcttcaggatgaaattacaaggcacttgaggttctccataatctggctccggcctacactctcagatctccaccacccacacaagagtaatctggcacaagaggacttagccgttaaaggattcttggcctttctggattcaagccctgcttgcacttcttacaaacttcaggatcttgagcgagtactttgctaaacccctatttcctcacatgtaagacaggaacagttaagagtctccacctcattgaattctgtagagattaaataaggaaatccacaagaagtatttagcccagcacttggcaccaagaagctccaagctcctttcctctatcatggccctaattggttaagaacctgtccttcccatgggtcctatgttcagaggggatcctgggtgcctttcatctctgtttcccctttgcctagctcagtgcctggtcccaagaaaactcaataaatgcttattaatgcatagatagaccacacacttggcacaagtcatctcattgttcttcactttcatgtgtgtaaatcttatctctcctaacagagtttgagcttcagggtatgggggaggtggtgctgggagaaggtggtgaggtgtcttcatgtcagagcatccagaatgggagggatctctaagctcttgacatccctgtaccccccatggtgcccagcctggagcagggagtcatgaaggccttgttgacagatgggcctgtcatattccccaagaagaaggcacgtctcccgctccgagatatcgccctaattactccctggtccctcccctccacacacacatcggctttcttaggcaagagcctgcttgacttacacacatggagttcttttagctggtggttctgagccagctcagccagtttcttcagaaactacagcagaaagagaggaaaggttttttaaagccatagggcacaaaaccagagtgagggatgggtgaagtttccccagcaaaaggccagcaatggaccagcattggtcagatcatctcagcactgttccaaaggcaaacctgatggcatagtagaagggttaagtgtgtcgggctctgcactcagagactctcaggtttattccaggctttggccctaaccttctgggtgacgctgcacaattgacttaccctttctaagctcagttcccttggctatagagtggggacaatgttagtactaggaggatttaattagacaagatatcaaagggttggctatcactatgattatgatgatttttgtcattattattataataccattgaatataagatccagaaggaacctcaaaggtcatgtgagaggagagaacactgcagccagcagaggtggcctgactttgctaaaacatacagcagatcagtgcttttttctttacctctttcgctgacatctttcagagaaccaagggagtttgctcacttacccctgaccttggagttggtcccctaccttgacttgaagaacacagatttgggggtcttgaagccaacaacgaccaaaaaaatgggcattgttttcaccaatgggccctcgccagttggaggtggcccagccactgctgacaccatgctataggatggagcatggcctctacttgctatccatccttgaggaagggactgtgggctgggttcactataggcacagcctggacttgggaggcaaggcactgtctgctcccccttctccagctgagttctgcactctggcctctccttagcccggcccaggggctctgcctgcccacctgcctgccaaatggaatccctgcttccacccatcccaaatgcctcttccccactgccctccctctccctgaggctgggaaagacctggctggtccatctagaggatggcactgggcagggggcaaggcttagggagctgtggaaggccgctgccccgggtcaagaaggcaggtctccagcaatcttcaagggaggtgtgctctcagggctgaaggggagcccaacagcactgggagaaaaacaaaaacaggaaggcttgccatccagtaggcagctactctctccttggctcaaattacatgtcattccagtcaatcttggcaatagctccttctccactgggtggtttgtgagggcggagtgggaagctacatccacagcagagtacctggaaagaagaagcttgtgttaggggtgcacggtgagagaggctgccagctacttctctgtcgaagtactaacagaggtgccccttagaatagaccttccttgttcaggtacatctccctcggccagggtggaggaagcacgctcctctcaactccccaaacacaaagccaggaggtccccgtggcctgacaaaggcttctactactccattggctacagagctggcctcagaagcatcagtgggcaaatatgcatggggcccaaaaagcttccatgatcagggcctgcgtggggcacgcatgctcaggcactttagtcatgtctgactctttgcaaccctatggactgcagcccgccaggctcctctgtccatgggatcctccaggcaagattactggagtgtgttgccatgcccttctccaggggatcttccttaaccaggggtcaaacccacgtctcctgctttgcaggcagattctttaccaacgagccatcagggaaacccttctatgatcagcactgtgtcttaaaagttgggataacccattgtctagaaaagactccaaatagctggtcccctctccatgagggaagggagggtctgaaaggaggaccagattcagcacaatgtctgggattttggtaggagagctggttctggcttcccaagtggctgaagtagaagcctctcttggcctggcatggtggtttgctttgaggccaatggctaagaaagtgctaaccttggacccaaagtgcagagatcgcaggagcacaggctccactgaaaaggagaacaagggtccgtgaagctgagcagagcacgtcttccacagcgcccccattgtcagcagcagcagttagcactgatggcctggtgaggactagtttctctcttcctgacactggaagtaggagtcttctcttgggacagagaaaccttctgggtctttctggacaagggacggcaatggcttcagtcaggagacactgaacttccattaaattccacaggcagatatttgagcaattaactggaaaatgaagacttgagaccagtcctcccaaactagtgaggtgcatggttctggttattgcatagaacttgactatctcgttggttcctcataacagctcaacaagcaggcataattatacccactaaatatatgagaaaattgaggttccaaggagtcaaagacacgtgccagttcactcagctgggaagtgttggacctgggactggaatgatctctgctcagtgccccacgagattgaacagaaacctgaggacccagggccagcgcttctcatactgactctttcctatccttcagattacagtttaaccatctcctcctcaaagaggccgctgagccccagaacctgcagtgtgttccccccaccccatgacatctatacatctggacaatatttcttcctttcttagaatattatcataatgatcataacctcatttttacttgtggttttaaaatctctttgatctgcttctctctggagaatgttttccccacgagacagcacataatgtgcagtgtgcaccactgagccccaggcccagcacagggccgagcacatggtggaaccctgtatattgtttgaaggaatcattgagtagatggttaacgggtacttgaaagcatgtcctctttggatggcatgaaaaatcaagatgatcataagagagaggagaaaatccaggagagacacaagaccccatctccaaattctaaagggctgtcctgtaactataggaacaggtggggtgggaggcacaaaactggggttgctggaaagcaggactctcaatggttagggaaactgagcccctttcgaggctcctgccctgtataagcacaccctgaccatctatcccttcctgccccacctgggaaggactccagccatagctaaaggaggcttgtcaggcctgagtggtggctgctcagggactcaaagcaaagcaggttgttggggcgggctccaaggaggaggtgagctgcagggcttcctgggggattatcaggagcaaggatctctgggcagagacatgggtctgtctgctgaaacttgctcagagcagcttctgggcttcctggtcagataattgcaaacaaaatagaccagggactgggcagcagctacaaacccctcttatataagagaagggcctgggctgaggcatgcaggagcaggcagcagggccctgagtcatacaaggaacgagacccattcagaacagctaagattctggcctcagaagctttcagtgatgatgctggtggctttgcctttctctggccgcaggcttcccatttgcaaactgagaaccactggacatccactctgtacctggccagcactggggagaaggaggcattgacactacctcccagacacccaggaaggagcaccaactgacacactctggttcagacccggggtcagggaaaggcagtggggtagggggatcagcagagtacttccagaaagaaggtggaggacccatgctttaagctctttctctgtccctcttaaggaaactctgaccacccagaagagactggaaggtggccaagaaggatctagccgcaactggccagcagtacctgggactcaggtgcctgggtttcctcggggaagtgcacatttatgctcatttgtattatgctgcaatgtacatatatatatatgcaaatcacatatttgtgtgtttgtgtatgtgaatctctatactcctctgtgtgtgtttgcttctaactaggtttaattccaactctatgtgcccatgcatatgtgtgtgcccttgtatgtttctaggtatacacaggagtccaagtgattacgtaagttatacacatttattcattccagatatttatagggtgcccattacatgctacgtgttgtcctagggctgagaatgcagaggaaaaaattcaaggtctctttcctcatgtagtttgcctgcagcataaaagataagcaataaatgagggaataaacaaatgaataaataattgcagattgtgatcacttacatgaaagggaaaaaagcaggataattagagagtgacttgactttacataaagaggttaggaaagacagcttggaaatacagaaactcaggcctcaaacaagacctcctaattcagaatctgcattttaacaaggtccttagagggtctgcatgcacatcagacattaagaaactctcattaacatacacatgacatggaggacaaagggaatagaggcaaatgccacagatctccttctgctgctcgccatgagataatagttgggattcattgatcagtttccttcttccctgggcagaattctttgcccacaaaaatcactcaaggatctgaaaccttggaggccccgcccaactaaggctaccgcagtcttcagctgttgctgttcagtcatgtccaaccctttgtgaccccatggacttcagtaagccaggcttactgtctttcactggcgttccctgtctttctctacctcctggagtttgctcaaactcatgtccattgaatcagtgatgcagtcttcagttaacttttagcctaagacattttccacctctgttactcactgcccccactgagaatcagaaagctgatttccccatgacagaatcagtaaccccagtcacactgaaacccccttttctactagcttgcccaaagacataaggagttttcaatggtcagctggcgttcttaacttccacttgaatgcaaatattcttgcatcctctagtggaaacattccttccttgggcaccaaaacttctgaccccaagtttgaggggcaggtccttaggtgggattgtaggcactgccactgctccttctgctgctcagcccctggccctgtattccagctctgggagaaatagtaccatgtatagccagctgattaagagtgaatacagcatcttataggatgccccttccccaccaccaacatcacagtgtcttttaattccctttggctctgggacctagatttttattaggtcatttcataattttataggtccattgatttcttggtaatggggtacccgggatgaccaatggatccaattatcttcagtccattggcttactcctctccctgtaaaatggatttcttgatctacagcaatgttgtatgggatatcaagacagtggatgaggtattcatagagtctgcagatggttctgctggaagaattatggcaggcaggggaagcagatccaaatccagagtaagtagctgttccaatgaagaaaaattgctgttcctcccatgaaggaaagaatctgatgtcgtctccccctgaccacgtgacagccacagctgctttgtcactgagtccactgagcaagccctggggtgaccaggaaaagacaccaacaggcatccacaggaggtcatcttgaccacctgtttcttaaagccctttcttccagggtcttcaggtttcattcgagtgagtgttcttataggacacaagtaaactcgtgatgttggatccattctgagggtccaatcacatgccttttctccaagcttctctttcaccaacccttcagtcctgtctcttcccagtccctgtccctctgaccaaatcattagccacttcccatacatcactgtagaacataaacctctgttcttccagaccgagacagtgagacacaccaaagtgctgctcactgcggggatttctctattctgtcctccagggatacctctaaatggggctgtaattacacagcctcacactctactagcataacacgcagagccatttgttaagcaggctcagaatgcttttctcctccatacatgggctatagggaattcctgtgagagcgtaagtgtctgctgagaaagatgcagtatccagcaggtgtgagccacctcttatgcaacatgcttgtgctttcaggacctgcttgggtccagaccactttaccacctccactgaaggagggagtactgttgggtgtgctcagtttaatgggtaggtggacctgataacacagttgttctcttggactaaacgattgcatcatagtctatgctcaggtggttagcctctgttagtgccaaggggcaagccaagagtcatttctcaagaggtgaacatttgccagagaaggcatggtcttgctccaaaaatgaagcatctccagccatgatgctgctctctggtcttgccaaaagactccatgcagcatctcaatctgccacaaactttcagtacctttgaatctagtatattataaaaacttggcttgaagtcttaactagctcagatcccatttaaagccaacagcttttttgctcactcaggagctggcttgaagtagaagacacaagtgtggtagatgttgcctctaaaacccaaagcagcccaccgagtgataagtccctttcttagtgatctgcgatgtagagtgtcacagcctattcttcactttgaaggggatattctgaatttcccaggctgatattttcccagaagcttaattgagttccctgtattttctcagactatttttccttcaccatgcctctccaaatacaattgtatttcaagatacttattatcttatgatctctgtgtcctacgagtaagatatcaccaggacgtctctggcagtccagtggttaagactctgcttccactgcagggggtatgggttccatccctggttagggaactaaaatcccacatgatgcactgggcagccaaaaaatcaccagtgttctagatgaatgatgaaaagatcgatgtccctatgaactaactcgttagagggccagacgtgaaattagagttgacacagcatcatggcgaagtgggaggtgcactgctgttctgcctcgagaagtctacacacttttgatgtcctctgattattaccatagaggagtgaaagtattctctgagtgttaggtttgcattaatttgttatagccacaaaaccatacttgaagcatcatgggactataattggagttaccaatatatattaatgataacaatcccacgttaatttttaagacttatctatcttacgcattggtcaaactagaaaattttgaccttagccttaagctttgtggtcccaccaaagaagtgtcattgcactgacttactactttgatgttgtttgaaaacctacagtggctttcacttaggctccatgggtcagggagccagtgtagtaaatctgccaattctggggttgtctattctaactatacacttggaatctgggtaaataaccacagatagtactgctgtgtggtatggaagaggctcagatcaacattccaaattaaaaagtttatcttatccaaataaatccctaatctaatcaggtcagtctctggggtaactgatttctttagaaatactggagtgggttacccttttgttctccaggggatcttcccaacccagggatcgaacccgggtctcctgcattggaggcagaagctttaacctctgagccaccagggaagccccttcattcagggctagtatctactaattctcaaaatatctagggtctttgcctgtactctgttaccttgaaacatgaccacatatccctttggggaaggacaagagaagttttaaggaattaaattattacccaatgtgttattacatagtgtttcttcaagggggtcccctcctcttttatacaacagactgtttctgcttattgactaggggaggttctgaaaattttccattgtgatagttcagcttattttctactcataagatgcatgtctattttattatatgaatcaatatagggcttttgtgggctctccacctcttctggccttaaacccatgatcattaaccatgtccaaaaaataaagagtgccctgttgtttgaaccattccaattaccacgaggctctgctcactatgacggtcacacacccagcctctaacctcgaagtgccaccacatggtctctgccacactacgatcctcccatttccattgacaccagggacccattcagctatggcaggctctgccaggatgcctagctcacagagcacagccattga

1. A method for determining at least one of susceptibility, resistance or tolerance to Mycobacterium avium subspecies paratuberculosis (Map) infection of a subject, comprising:
obtaining a biological sample from a mammalian subject;
determining, using the biological sample, a presence or absence of at least one mutation, or the genotype of at least one single nucleotide polymorphism (SNP) within Map infection linkage disequilibrium region SEQ ID NO:46 that segregates with resistance and/or tolerance to Map tissue infection, or determining a presence or absence of at least one mutation or a genotype of at least one SNP within a Map infection linkage disequilibrium region (SEQ ID NO:1) that is in linkage disequilibrium with the presence or absence of the at least one mutation or with the genotype of the at least one SNP within SEQ ID NO:46; and
determining, based thereon, at least one of susceptibility, resistance or tolerance of the mammalian subject to Mycobacterium avium subspecies paratuberculosis (Map) infection.

2. The method of claim 1, wherein the at least one single nucleotide polymorphism (SNP) within Map infection linkage disequilibrium region SEQ ID NO:46, is at least one selected from the SNP group consisting of, relative to the sequence of accession no. NC_{—}007301.3, SNPs at positions 111,606,781, 111,610,137, 111,611,773, 111, 623,092 and 111,682,511 (ARS-BFGL-NGS-113303) as defined herein.

3. The method of claim 1, wherein the genotypes of at least two single nucleotide polymorphisms (SNPs) within Map infection linkage disequilibrium region SEQ ID NO:46, are determined.

4. The method of claim 1, wherein at least one of resistance or tolerance of the mammalian subject to Mycobacterium avium subspecies paratuberculosis (Map) infection is determined.

5. The method of claim 1, wherein the mammalian subject is bovine.

6. The method of claim 1, further comprising at least one of culling, selecting, or breeding, based on the determining of at least one of susceptibility, resistance or tolerance of the mammalian subject to Mycobacterium avium subspecies paratuberculosis (Map) infection.

7. The method of claim 1, further comprising selective breeding to produce offspring having at least one of susceptibility, resistance or tolerance to Mycobacterium avium subspecies paratuberculosis (Map) infection.

8. A method for determining at least one of susceptibility, resistance or tolerance to Mycobacterium avium subspecies paratuberculosis (Map) infection of a subject, comprising:
obtaining a biological sample from a mammalian subject;
analyzing, using the biological sample, a mammalian genotype to determine if the genotype comprises at least one single nucleotide polymorphism (SNP) associated with at least one of susceptibility, resistance or tolerance to Mycobacterium avium subspecies paratuberculosis (Map), wherein the SNP is at least one selected from the SNP group consisting of, relative to the sequence of accession no. NC_{—}007301.3, SNPs at positions 111,606,781, 111,610,137, 111,611,773, 111, 623,092 and 111,682,511 (ARS-BFGL-NGS-113303) as defined herein; and
determining, based thereon, at least one of susceptibility, resistance or tolerance of the mammalian subject to Mycobacterium avium subspecies paratuberculosis (Map) infection.

9. The method of claim 8, wherein the genotypes of at least two single nucleotide polymorphisms (SNPs) are determined.

10. The method of claim 8, wherein at least one of resistance or tolerance of the mammalian subject to Mycobacterium avium subspecies paratuberculosis (Map) infection is determined.

11. The method of c wherein the mammalian subject is bovine.

12. The method of claim 8, further comprising at least one of culling, selecting, or breeding, based on the determining of at least one of susceptibility, resistance or tolerance of the mammalian subject to Mycobacterium avium subspecies paratuberculosis (Map) infection.

13. The method of claim 8, further comprising selective breeding to produce offspring having at least one of susceptibility, resistance or tolerance to Mycobacterium avium subspecies paratuberculosis (Map) infection.

14. A method for determining at least one of susceptibility, resistance or tolerance to Mycobacterium avium subspecies paratuberculosis (Map) infection of a subject, comprising:
obtaining a biological sample from a mammalian subject;
analyzing, using the biological sample, a mammalian genotype to determine if the genotype comprises at least one single nucleotide polymorphism (SNP) associated with at least one of susceptibility, resistance or tolerance to Mycobacterium avium subspecies paratuberculosis (Map), where the SNP is at least one selected from the SNP group consisting of the SNPs listed in Table 3A and 3B herein; and
determining, based thereon, at least one of susceptibility, resistance or tolerance of the mammalian subject to Mycobacterium avium subspecies paratuberculosis (Map) infection.

15. The method of claim 15, wherein the genotypes of at least two single nucleotide polymorphisms (SNPs) are determined.

16. The method of claim 15, wherein at least one of resistance or tolerance of the mammalian subject to Mycobacterium avium subspecies paratuberculosis (Map) infection is determined.

17. The method of claim wherein the mammalian subject is bovine.

18. The method of claim 8, further comprising at least one of culling, selecting, or breeding, based on the determining of at least one of susceptibility, resistance or tolerance of the mammalian subject to Mycobacterium avium subspecies paratuberculosis (Map) infection.

19. The method of claim 8, further comprising selective breeding to produce offspring having at least one of susceptibility, resistance or tolerance to Mycobacterium avium subspecies paratuberculosis (Map) infection.

20. A method for determining at least one of susceptibility, resistance or tolerance to Mycobacterium avium subspecies paratuberculosis (Map) infection of a subject, comprising:
obtaining a biological sample from a mammalian subject;
determining, using the biological sample, a presence or absence of at least one mutation, or the genotype of at least one single nucleotide polymorphism (SNP) within at least one gene selected from the group consisting of HIVEP3 (Human immunodeficiency virus type I enhancer-binding protein 3) (SEQ ID NO:2); EDN2 (Endothelin 2) (SEQ ID NO:3); and LOC521287 (Bos taurus similar to forkhead box O6) (SEQ ID NO:4) that segregates with resistance and/or tolerance to Map tissue infection, or determining a presence or absence of at least one mutation or a genotype of at least one SNP within a Map infection linkage disequilibrium region (SEQ ID NO:1) that is in linkage disequilibrium with the presence or absence of the at least one mutation or with the genotype of the at least one SNP within within at least one gene selected from the group consisting of HIVEP3 (Human immunodeficiency virus type I enhancer-binding protein 3) (SEQ ID NO:2); EDN2 (Endothelin 2) (SEQ ID NO:3); and LOC521287 (Bos taurus similar to forkhead box O6) (SEQ ID NO:4); and
determining, based thereon, at least one of susceptibility, resistance or tolerance of the mammalian subject to Mycobacterium avium subspecies paratuberculosis (Map) infection.

21. The method of claim 20, wherein the genotypes of at least two single nucleotide polymorphisms (SNPs) are determined.

22. The method of claim 20, wherein at least one of resistance or tolerance of the mammalian subject to Mycobacterium avium subspecies paratuberculosis (Map) infection is determined.

23. The method of claim 20, wherein the mammalian subject is bovine.

24. The method of claim 20, further comprising at least one of culling, selecting, or breeding, based on the determining of at least one of susceptibility, resistance or tolerance of the mammalian subject to Mycobacterium avium subspecies paratuberculosis (Map) infection.

25. The method of claim 20, further comprising selective breeding to produce offspring having at least one of susceptibility, resistance or tolerance to Mycobacterium avium subspecies paratuberculosis (Map) infection.
